(19) United States
(12) Patent Application Publication
(10) Pub. No.: US 2008/0115240 A1
(43) Pub. Date: May 15, 2008

(54) MAIZE MICRORNA SEQUENCES

(76) Inventors: Milo Aukerman, Newark, DE (US); James Tisdall, Philadelphia, PA (US); Hajime Sakai, Newark, DE (US); Jeanne M. Wilson, Philadelphia, PA (US)

Correspondence Address: E I DU PONT DE NEMOURS AND COMPANY;LEGAL PATENT RECORDS CENTER, BARLEY MILL PLAZA 25/1122B, 4417 LANCASTER PIKE, WILMINGTON, DE, 19805, US

(21) Appl. No.: 11/868,081

(22) Filed: Oct. 5, 2007

Related U.S. Application Data
(60) Provisional application No. 60/849,672, filed on Oct. 5, 2006.

(51) Int. Cl. A01H 1/00; C07H 21/04

(52) U.S. Cl. 800/278; 536/23.6

(57) ABSTRACT

Methods and compositions useful in target sequence suppression and target sequence validation are described. Polynucleotide constructs useful for gene silencing, as well as cells, plants and seeds comprising the polynucleotides and a method for using microRNAs to silence a target sequence are also described.

[0001] This application claims the benefit of U.S. Provisional Application No. 60/849,672, filed Oct. 5, 2006, the disclosure of which is hereby incorporated by reference in its entirety.

### FIELD OF THE INVENTION

[0002] The field of the present invention relates generally to plant molecular biology. More specifically it relates to constructs and methods to suppress the expression of targeted genes.

### BACKGROUND

[0003] MicroRNAs (miRNAs) were first identified only a few years ago, but already it is clear that they play an important role in regulating gene activity. These 20-22 nucleotide noncoding RNAs have the ability to hybridize via basepairing with specific target mRNAs and downregulate the expression of these transcripts, by mediating either RNA cleavage or translational repression. Recent studies have indicated that miRNAs have important functions during development. In plants, they have been shown to control a variety of developmental processes including flowering time, leaf morphology, organ polarity, floral morphology, and root development (reviewed by Mallory and Vaucheret (2006) Nat Genet. 38: S31-36). Given the established regulatory role of miRNAs, it is likely that they are also involved in the control of some of the major crop traits such drought tolerance and disease resistance.

[0004] Plant miRNAs are processed from longer precursor transcripts termed pre-miRNA that range in length from 50 to 500 nucleotides, and these precursors have the ability to form stable hairpin structures (reviewed by Bartel (2004) Cell 116: 281-297). Many miRNA hairpin precursors originate as longer transcripts of 1-2 kb or longer, termed pri-miRNA, that are polyadenylated and capped. This fact coupled with the detection of numerous pri-miRNAs in Expressed Sequence Tags (ESTs) libraries indicates that RNA polymerase II is the enzyme responsible for miRNA gene transcription. Transgenic experiments indicate that it is the structure rather than the sequence of the pre-miRNA that directs their correct processing and that the rest of the pri-miRNA is not required for the production of miRNAs. While pri-miRNAs are processed to pre-miRNAs by Drosha in the nucleus and Dicer cleaves pre-miRNAs in the cytoplasm in metazoans, miRNA maturation in plants differs from the pathway in animals because plants lack a Drosha homolog. Instead, the RNase III enzyme DICER-LIKE 1 (DCL1), which is homologous to animal Dicer, may possess Drosha function in addition to its known function in hairpin processing (Kurihara and Watanabe (2004) Proc Natl Acad Sci 101: 12753-12758).

[0005] Through the cloning efforts of several labs, at least 30 miRNA families have been identified in Arabidopsis (reviewed by Meyers et al. (2006) Curr Opin Biotech 17; 1-8). Many of these miRNA sequences are represented by more than one locus, bringing the total number up to approximately 100. Because the particular miRNAs found by one lab are not generally overlapping with those found by another independent lab, it is assumed that the search for the entire set of miRNAs expressed by a given plant genome, the “miRNome,” is not yet complete. One reason for this might be that many miRNAs are expressed only under very specific conditions, and thus may have been missed by standard cloning efforts. A recent study by Sunkar and Zhu (2004, Plant Cell 16: 2001-2019) suggests that, indeed, miRNA discovery may be facilitated by choosing “non-standard” growth conditions for library construction. Sunkar and Zhu identified novel miRNAs in a library consisting of a variety of stress-induced tissues. They proceeded to demonstrate induction of some of these miRNAs by drought, cold and other stresses, suggesting a role for miRNAs in stress response. It is likely, then, that efforts to fully characterize the plant miRNome will require examination of the small RNA profile in many different tissues and under many different conditions.

[0006] A complementary approach to standard miRNA cloning is computational prediction of miRNAs using available genomic and/or EST sequences, and several labs have reported finding novel Arabidopsis miRNAs in this manner (reviewed by Bonnet et al. (2006) New Phytol 171:451-468). Using these computational approaches, which rely in part on the observation that known miRNAs reside in hairpin precursors, hundreds of plant miRNAs have been predicted. However only a small fraction have been experimentally verified by Northern blot analysis. In addition, most of these computational methods rely on comparisons between two representative genomes (e.g. Arabidopsis and rice) in order to find conserved intergenic regions, and thus are not suitable for identifying species-specific miRNAs, which may represent a substantial fraction of the miRNome of any given organism.

[0007] Computational methods have also facilitated the prediction of miRNA targets, and in general plant miRNAs share a high degree of complementarity with their targets (reviewed by Bonnet et al. (2006) New Phytol 171:451-468). The predicted mRNA targets of plant miRNAs encode a wide variety of proteins. Many of these proteins are transcription factors and are thus likely to be important for development. However, there are also many enzymes that are putatively targeted, and these potentially have roles in such processes as mitochondrial metabolism, oxidative stress response, proteasome function, and lignification. It is likely that this list of processes regulated by miRNA will get longer as additional miRNAs are identified, and that eventually miRNAs will be implicated in processes critical to crop improvement. For example, a recently identified miRNA targeting genes in the sulfur assimilation pathway was identified, and shown to be induced under conditions of sulfate starvation (Jones-Rhoades and Bartel (2004) Mol Cell 14: 787-799). This particular miRNA, then, is a candidate gene for increasing sulfur assimilation efficiency. It is tempting to speculate that the pathways for assimilating other compounds such as water and nitrate may also be under miRNA control.

[0008] Much of the work on identification of novel miRNAs has been carried out in the model system Arabidopsis, and thus miRNomes of crop plants such as maize, rice and soybean are less fully understood. There is also no complete genome sequence available for crops such as maize and soybeans, further hampering miRNome analysis. Many Arabidopsis miRNAs have homologs in these other species, however there are also miRNAs that appear to be specific to Arabidopsis. Likewise, it is expected that there will be nonconserved miRNAs specific to the aforementioned crop species. A significant fraction of the non-conserved miRNAs could be part of the regulatory networks associated with species-specific growth conditions or developmental processes. As such, it is crucial to carry out miRNA cloning in crop species such as maize, to complement the bioinformatic approaches currently being used, and ultimately to more fully characterize the miRNomes of crop species.

### BRIEF DESCRIPTION OF THE TABLES

### Table 1: The table of putative miRNAs consists of 2808 rows of 6 columns, which are

[0009] 1: ID: a unique ID number, which represents the SEQ ID NO for the corresponding microRNA (miRNA) in that row
[0010] 2: miRNA: the 21 nucleotide maize microRNA sequence
[0011] 3: TARGETSEQ: the exact complement of the miRNA that corresponds to one potential site for cleavage on the target mRNA
[0012] 4: BACKBONE: the genomic DNA sequence that forms a hairpin structure incorporating the miRNA sequence
[0013] 5: FOLD: secondary structure information for the backbone sequences based on context free grammar of nested parentheses, where a “(” represents a nucleotide that hybridizes with a down stream nucleotide denoted by a “)”, and a “.” represents an unpaired nucleotide the resulting structure displays the hairpin structure formed by the backbone
[0014] 6: TARGET: public ID(s) of possible genomic targets of the miRNA, databases that were searched included rice genes from the TIGR Version 4 rice datasets all.cds and all_small_genes.cds; and the TIGR maize gene index file ZMGI.101205.

### Table 4: The table of small RNA expression data for maize microRNAs of the present invention and public domain Zea mays microRNAs consists of 2702 rows of 18 columns, which are

[0015] 1: ID: a unique ID number, which represents the SEQ ID NO for the corresponding putative microRNA (miRNA) in that row, or the public domain Zea mays names associated with the miRNA sequence in that row
[0016] 2: MIRNACORE: the ˜21 nucleotide maize microRNA sequence, also referred to as the “query sequence”
[0017] 3. CALL B73_LEAF: the detectability assessment applied to the miRNA in that row based on its corresponding expression profiling measurements in RNA samples derived from B73 leaf tissue. “PASSED,” “ENRICHED” or “HIGHLY ENRICHED” were applied only if the array data for that miRNA met the specificity, reproducibility and signal strength criteria in Table 3. “ENRICHED” was applied to miRNAs showing between 5-fold and 10-fold more perfectly sequence matched (0MM) probe signal intensity in B73 leaf samples than in other samples in the same experiment. “HIGHLY ENRICHED” was applied to miRNAs showing 10-fold more 0MM-probe signal intensity in B73 leaf samples than in other samples in the same experiment. Sample B73 Leaf and all other samples are described in Table 2
[0018] 4. 0MM B73_LEAF: the normalized fluorescence intensity score of the perfectly sequence matched probe of the miRNA in that row as measured in expression profiling of genotype B73 leaf RNA.
[0019] 5. CALL B73_EAR: the detectability assessment applied to the miRNA in that row based on its corresponding expression profiling measurements in RNA samples derived from B73 ear tissue.
[0020] 6. 0MM B73_EAR: the normalized fluorescence intensity score of the perfectly sequence matched probe of the miRNA in that row as measured in expression profiling of genotype B73 ear RNA.
[0021] 7. CALL B73_SEEDLING: the detectability assessment applied to the miRNA in that row based on its corresponding expression profiling measurements in RNA samples derived from B73 seedling tissue.
[0022] 8. 0MM B73_SEEDLING: the normalized fluorescence intensity score of the perfectly sequence matched probe of the miRNA in that row as measured in expression profiling of genotype B73 seedling RNA.
[0023] 9. CALL 3245_Normal_N: the detectability assessment applied to the miRNA in that row based on its corresponding expression profiling measurements in RNA samples derived from 3245 leaf tissue grown in fields with normal levels of nitrogen.
[0024] 10. 0MM 3245_Normal_N: the normalized fluorescence intensity score of the perfectly sequence matched probe of the miRNA in that row as measured in expression profiling of RNA from leaves of genotype 3245 plants grown in fields with normal levels of nitrogen.
[0025] 11. CALL 3245_Low_N: the detectability assessment applied to the miRNA in that row based on its corresponding expression profiling measurements in RNA samples derived from 3245 leaf tissue grown in fields with low levels of nitrogen.
[0026] 12. 0MM 3245_Low_N: the normalized fluorescence intensity score of the perfectly sequence matched probe of the miRNA in that row as measured in expression profiling of RNA from leaves of genotype 3245 plants grown in fields with low levels of nitrogen.
[0027] 13. CALL 33B50_Low_N: the detectability assessment applied to the miRNA in that row based on its corresponding expression profiling measurements in RNA samples derived from 33B50 leaf tissue grown in fields with low levels of nitrogen.
[0028] 14. 0MM 33B50_Low_N: the normalized fluorescence intensity score of the perfectly sequence matched probe of the miRNA in that row as measured in expression profiling of RNA from leaves of genotype 33B50 plants grown in fields with low levels of nitrogen.
[0029] 15. CALL B73_Low_N: the detectability assessment applied to the miRNA in that row based on its corresponding expression profiling measurements in RNA samples derived from B73 leaf tissue grown with minimal nitrogen supplementation.
[0030] 16. 0MM B73_Low_N: the normalized fluorescence intensity score of the perfectly sequence matched probe of the miRNA in that row as measured in expression profiling of RNA from leaves of genotype B73 plants grown with minimal nitrogen supplementation.
[0031] 17: TARGETSEQ: the exact complement of the miRNA that corresponds to one potential site for cleavage on the target mRNA
[0032] 18: TARGET: public ID(s) of possible genomic targets of the putative miRNA, databases that were searched included rice genes from the TIGR Version 4 rice datasets all.cds and all_small_genes.cds; and the TIGR maize gene index file ZMGI.101205.

### BRIEF DESCRIPTION OF THE SEQUENCE LISTING

[0033] A Sequence Listing and Table are provided herewith on Compact Disk. The contents of the Compact Disk containing the Sequence Listing and Table are hereby incorporated by reference in compliance with 37 CFR 1.52(e). The Compact Disks are submitted in triplicate and are identical to one another. The disks are labeled “Copy 1—Sequence Listing and Table”, “Copy 2—Sequence Listing and Table”, and CRF. The disks contain the following files: BB1593 US PRV Sequence Listing having the following size: 1,471,000 bytes and BB1593 US PRV Table having the following size: 4,430,000 bytes which were created Oct. 5, 2006.

[0034] SEQ ID NOs: 1-2652 represent individual 21 nucleotide microRNA sequences from maize. The individual microRNAs are shown in Table 1 as the “miRNAcore” column (column 2), the SEQ ID NO for each sequence is shown in column 1 (ID) of Table 1.

[0035] SEQ ID NOs: 2653-5304 represent the complement of SEQ ID NOs:1-2652, also shown as “targetseq” in column 3 of Table 1.

[0036] SEQ ID NOs:5305-7956 represent the “backbone” hairpin sequence that surrounds the miRNAs in SEQ ID NOs:1-2652, respectively, in the maize genome. This information can also be found in column 4 of Table 1.

[0037] SEQ ID NO:7957 is a sequential concatenation of all 21 nucleotide miRNAs found in SEQ ID NOs:1-2652 (21×2652=55,692). It is believed that this representative example is one of many different forms that are useful for altering plant gene expression. Other examples would include different ordering of the individual miRNA sequences, duplication of certain miRNA sequences, elimination of certain miRNA sequences, and altered spacing in between the miRNA sequences.

[0038] SEQ ID NO:7958 is a 21 nucleotide sequence complementary to the Arabidopsis fatty acid desaturase 2 (FAD2) gene.

[0039] SEQ ID NOs: 7959-8114 represent individual 21 nucleotide microRNA sequences from maize. The individual microRNAs are shown in Table 1 as the “miRNAcore” column (column 2), the SEQ ID NO for each sequence is shown in column 1 (ID) of Table 1.

[0040] SEQ ID NOs: 8115-8270 represent the complement of SEQ ID NOs:7959-8114, also shown as “targetseq” in column 3 of Table 1.

[0041] SEQ ID NOs:8271-8426 represent the “backbone” hairpin sequence that surrounds the miRNAs in SEQ ID NOs:7959-8114, respectively, in the maize genome. This information can also be found in column 4 of Table 1.

[0042] SEQ ID NO:8427 is a sequential concatenation of all 21 nucleotide miRNAs found in SEQ ID NOs:7959-8114 (21×156=3,276). It is believed that this representative example is one of many different forms that are useful for altering plant gene expression. Other examples would include different ordering of the individual miRNA sequences, duplication of certain miRNA sequences, elimination of certain miRNA sequences, and altered spacing in between the miRNA sequences.

[0043] SEQ ID NOs:8428-8429 are RNA adaptors sequences.

### SUMMARY OF THE INVENTION

[0044] The present invention relates, inter alia, to an isolated polynucleotide comprising: a microRNA selected from the group consisting of SEQ ID NOs:1-2652 and SEQ ID NOs:7959-8114.

[0045] In a second embodiment, the invention relates to a full-length complement of the microRNA selected from the group consisting of SEQ ID NOs:1-2652 and SEQ ID NOs:7959-8114 or a nucleotide sequence capable of hybridizing to these aforemention microRNAs. wherein the hybridizable nucleotide sequence comprises at least 21 nucleotides.

[0046] In a third embodiment, the invention relates to an isolated polynucleotide useful for altering plant gene expression comprising SEQ ID NO:7957 or SEQ ID NO:8427 wherein said isolated polynucleotide comprises at least one functional domain having at least 21(x) contiguous nucleotides and x is an integer from 1 to 2652, further wherein said nucleotides start at nucleotide 1 or any nucleotide 21(x)+1.

[0047] In a fourth embodiment, the invention relates to a functional subdomain of such isolated polynucleotides, wherein said functional subdomain comprises at least one microRNA.

[0048] In a fifth embodiment, the invention relates to an isolated polynucleotide comprising a microRNA containing sequence selected from the group consisting of SEQ ID NOs: 5305-7956 and SEQ ID NOs:8271-8426.

[0049] In a sixth embodiment, the invention relates to a DNA expression construct comprising any of the isolated polynucleotides discussed herein operably linked to at least one regulatory sequence.

[0050] In a seventh embodiment, the invention relates to a plant comprising in its genome the DNA expression constructs discussed herein. Such plants can be selected from the group consisting of corn, rice, sorghum, sunflower, millet, soybean, canola, wheat, barley, oat, beans, and nuts.

[0051] In an eighth embodiment, the invention relates to transgenic seeds obtained from a plant comprising in its genome the DNA expression constructs discussed herein. Also within the scope of the invention are transformed plant tissue or a plant cell comprising in its genome the DNA expression constructs discussed herein.

[0052] In an ninth embodiment, the invention relates to by-products obtained from such transgenic seeds or to progeny plants obtained from such transgenic seeds.

[0053] In a tenth embodiment, the invention relates to a method for altering expression of a stably introduced nucleotide sequence in a plant comprising:
[0054] a) making a DNA expression construct comprising a stably introduced nucleotide sequence and at least one sequence capable of hybridizing to the isolated polynucleotide of the invention;
[0055] b) transforming a plant with the DNA expression construct of part (a); and
[0056] c) selecting a transformed plant which comprises the DNA expression construct of part (a) in its genome and which has altered expression of the stably introduced nucleotide sequence when compared to a plant transformed with a modified version of the DNA expression construct of part (a) wherein the modified construct lacks the sequence capable of hybridizing to the isolated polynucleotide of the invention.

### DETAILED DESCRIPTION

[0057] Information pertinent to this application can be found in U.S. patent application Ser. Nos. 10/963,238 and 10/963,394, filed Oct. 12, 2004. The entire contents of the above applications are herein incorporated by reference.

[0058] Other references that may be useful in understanding the invention include U.S. patent application Ser. No. 10/883,374, filed Jul. 1, 2004; U.S. patent application Ser. No. 10/913,288, filed Aug. 6, 2004; and U.S. patent application Ser. No. 11/334,776, filed Jan. 6, 2006.

[0059] Recently discovered small RNAs play an important role in controlling gene expression. Regulation of many developmental processes including flowering is controlled by small RNAs. It is now possible to engineer changes in gene expression of plant genes by using transgenic constructs which produce small RNAs in the plant.

[0060] The invention provides methods and compositions useful for suppressing targeted sequences. The compositions can be employed in any type of plant cell, and in other cells which comprise the appropriate processing components (e.g., RNA interference components), including invertebrate and vertebrate animal cells. The compositions and methods are based on an endogenous miRNA silencing process discovered in Arabidopsis, a similar strategy can be used to extend the number of compositions and the organisms in which the methods are used. The methods can be adapted to work in any eukaryotic cell system. Additionally, the compositions and methods described herein can be used in individual cells, cells or tissue in culture, or in vivo in organisms, or in organs or other portions of organisms.

[0061] The compositions selectively suppress the target sequence by encoding a miRNA having substantial complementarity to a region of the target sequence. The miRNA is provided in a nucleic acid construct which, when transcribed into RNA, is predicted to form a hairpin structure which is processed by the cell to generate the miRNA, which then suppresses expression of the target sequence.

[0062] Nucleic acid sequences are disclosed that encode miRNAs from maize. Backbone hairpins containing the individual miRNA sequences are also disclosed. Constructs are described for transgenic expression of miRNAs and their backbones. Alternatively, constructs are described wherein backbone sequences and miRNA sequences are exchanged thereby altering the expression pattern of the miRNA, and its subsequent specific target sequence in the transgenic host. Any miRNA can be exchanged with any other backbone to create a new miRNA/backbone hybrid.

[0063] A method for suppressing a target sequence is provided. The method employs any of the constructs above, in which a miRNA is designed to identify a region of the target sequence, and inserted into the construct. Upon introduction into a cell, the miRNA produced suppresses expression of the targeted sequence. The target sequence can be an endogenous plant sequence, or a heterologous transgene in the plant.

[0064] There can also be mentioned as the target gene, for example, a gene from a plant pathogen, such as a pathogenic virus, nematode, insect, or mold or fungus.

[0065] Another aspect of the invention concerns a plant, cell, and seed comprising the construct and/or the miRNA. Typically, the cell will be a cell from a plant, but other prokaryotic or eukaryotic cells are also contemplated, including but not limited to viral, bacterial, yeast, insect, nematode, or animal cells. Plant cells include cells from monocots and dicots. The invention also provides plants and seeds comprising the construct and/or the miRNA.

[0066] “Plant” includes reference to whole plants, plant organs, plant tissues, seeds and plant cells and progeny of same. Plant cells include, without limitation, cells from seeds, suspension cultures, embryos, meristematic regions, callus tissue, leaves, roots, shoots, gametophytes, sporophytes, pollen, and microspores.

[0067] The term “plant parts” includes differentiated and undifferentiated tissues including, but not limited to the following: roots, stems, shoots, leaves, pollen, seeds, tumor tissue and various forms of cells and culture (e.g., single cells, protoplasts, embryos and callus tissue). The plant tissue may be in plant or in a plant organ, tissue or cell culture.

[0068] The term “plant organ” refers to plant tissue or group of tissues that constitute a morphologically and functionally distinct part of a plant.

[0069] The term “genome” refers to the following: (1) the entire complement of genetic material (genes and non-coding sequences) present in each cell of an organism, or virus or organelle; (2) a complete set of chromosomes inherited as a (haploid) unit from one parent.

[0070] “Progeny” comprises any subsequent generation of a plant. Progeny will inherit, and stably segregate, genes and transgenes from its parent plant(s).

[0071] Units, prefixes, and symbols may be denoted in their Si accepted form. Unless otherwise indicated, nucleic acids are written left to right in 5′ to 3′ orientation; amino acid sequences are written left to right in amino to carboxyl orientation, respectively. Numeric ranges recited within the specification are inclusive of the numbers defining the range and include each integer within the defined range. Amino acids may be referred to herein by either commonly known three letter symbols or by the one-letter symbols recommended by the IUPAC-IUB Biochemical Nomenclature Commission. Nucleotides, likewise, may be referred to by their commonly accepted single-letter codes. Unless otherwise provided for, software, electrical, and electronics terms as used herein are as defined in The New IEEE Standard Dictionary of Electrical and Electronics Terms (5^{th} edition, 1993). The terms defined below are more fully defined by reference to the specification as a whole.

[0072] The terms “recombinant construct”, “expression construct”, “chimeric construct”, “construct”, and “recombinant DNA construct” are used interchangeably herein. A recombinant construct comprises an artificial combination of nucleic acid fragments, e.g., regulatory and coding sequences that are not found together in nature. For example, a chimeric construct may comprise regulatory sequences and coding sequences that are derived from different sources, or regulatory sequences and coding sequences derived from the same source, but arranged in a manner different than that found in nature. Such a construct may be used by itself or may be used in conjunction with a vector. If a vector is used, then the choice of vector is dependent upon the method that will be used to transform host cells as is well known to those skilled in the art. For example, a plasmid vector can be used. The skilled artisan is well aware of the genetic elements that must be present on the vector in order to successfully transform, select and propagate host cells comprising any of the isolated nucleic acid fragments of the invention. The skilled artisan will also recognize that different independent transformation events will result in different levels and patterns of expression (Jones et al., EMBO J. 4:2411-2418 (1985); De Almeida et al., Mol. Gen. Genetics 218:78-86 (1989)), and thus that multiple events must be screened in order to obtain lines displaying the desired expression level and pattern. Such screening may be accomplished by Southern analysis of DNA, Northern analysis of mRNA expression, immunoblotting analysis of protein expression, or phenotypic analysis, among others.

[0073] This construct may comprise any combination of deoxyribonucleotides, ribonucleotides, and/or modified nucleotides. The construct may be transcribed to form an RNA, wherein the RNA may be capable of forming a double-stranded RNA and/or hairpin structure. This construct may be expressed in the cell, or isolated or synthetically produced. The construct may further comprise a promoter, or other sequences which facilitate manipulation or expression of the construct.

[0074] As used here “suppression” or “silencing” or “inhibition” are used interchangeably to denote the down-regulation of the expression of a product of a target sequence relative to its normal expression level in a wild type organism. Suppression includes expression that is decreased by about 10%, 15%, 20%, 25%, 30%, 35%, 40%, 45%, 50%, 55%, 60%, 65%, 70%, 75%, 80%, 85%, 90%, 95%, or 100% relative to the wild type expression level.

[0075] As used herein, “encodes” or “encoding” refers to a DNA sequence which can be processed to generate an RNA and/or polypeptide.

[0076] As used herein, “expression” or “expressing” refers to production of a functional product, such as, the generation of an RNA transcript from an introduced construct, an endogenous DNA sequence, or a stably incorporated heterologous DNA sequence. The term may also refer to a polypeptide produced from an mRNA generated from any of the above DNA precursors. Thus, expression of a nucleic acid fragment may refer to transcription of the nucleic acid fragment (e.g., transcription resulting in mRNA or other functional RNA) and/or translation of RNA into a precursor or mature protein (polypeptide).

[0077] As used herein, “heterologous” with respect to a sequence means a sequence that originates from a foreign species, or, if from the same species, is substantially modified from its native form in composition and/or genomic locus by deliberate human intervention. For example, with respect to a nucleic acid, it can be a nucleic acid that originates from a foreign species, or is synthetically designed, or, if from the same species, is substantially modified from its native form in composition and/or genomic locus by deliberate human intervention. A heterologous protein may originate from a foreign species or, if from the same species, is substantially modified from its original form by deliberate human intervention.

[0078] The term “host cell” refers to a cell which contains or into which is introduced a nucleic acid construct and supports the replication and/or expression of the construct. Host cells may be prokaryotic cells such as E. coli, or eukaryotic cells such as fungi, yeast, insect, amphibian, nematode, or mammalian cells. Alternatively, the host cells are monocotyledonous or dicotyledonous plant cells. An example of a monocotyledonous host cell is a maize host cell.

[0079] The term “introduced” means providing a nucleic acid (e.g., expression construct) or protein into a cell. Introduced includes reference to the incorporation of a nucleic acid into a eukaryotic or prokaryotic cell where the nucleic acid may be incorporated into the genome of the cell, and includes reference to the transient provision of a nucleic acid or protein to the cell. Introduced includes reference to stable or transient transformation methods, as well as sexually crossing. Thus, “introduced” in the context of inserting a nucleic acid fragment (e.g., a recombinant DNA construct/expression construct) into ac ell, means “transfection” or “transformation” or “transduction” and includes reference to the incorporation of a nucleic acid fragment into a eukaryotic or prokaryotic cell where the nucleic acid fragment may be incorporated into the genome of the cell (e.g., chromosome, plasmid, plastid or mitochondrial DNA), converted into an autonomous replicon, or transiently expressed (e.g., transfected mRNA).

[0080] The term “genome” as it applies to a plant cells encompasses not only chromosomal DNA found within the nucleus, but organelle DNA found within subcellular components (e.g., mitochondrial, plastid) of the cell.

[0081] The term “isolated” refers to material, such as a nucleic acid or a protein, which is: (1) substantially or essentially free from components which normally accompany or interact with the material as found in its naturally occurring environment or (2) if the material is in its natural environment, the material has been altered by deliberate human intervention to a composition and/or placed at a locus in the cell other than the locus native to the material.

[0082] As used herein, microRNA or “miRNA” refers to an oligoribonucleic acid, which regulates expression of a polynucleotide comprising the target sequence. A “mature miRNA” refers to the miRNA generated from the processing of a miRNA precursor. A “miRNA template” is an oligonucleotide region, or regions, in a nucleic acid construct which encodes the miRNA. The “backside” region of a miRNA is a portion of a polynucleotide construct which is substantially complementary to the miRNA template and is predicted to base pair with the miRNA template. The miRNA template and backside may form a double-stranded polynucleotide, including a hairpin structure.

[0083] As used herein, “domain” or “functional domain” refer to nucleic acid sequence(s) that are capable of eliciting a biological response in plants. The present invention concerns miRNAs composed of at least 21 nucleotide sequences acting either individually, or in concert with other miRNA sequences, therefore a domain could refer to either individual miRNAs or groups of miRNAs. Also, miRNA sequences associated with their backbone sequences could be considered domains useful for processing the miRNA into its active form. As used herein, “subdomains” or “functional subdomains” refer to subsequences of domains that are capable of eliciting a biological response in plants. A miRNA could be considered a subdomain of a backbone sequence. “Contiguous” sequences or domains refer to sequences that are sequentially linked without added nucleotides intervening between the domains. An example of a contiguous domain string is found in SEQ ID NO:7957 which represents SEQ ID NOs: 1-2652 as a continuous string that can be thought of as 2652 miRNA sequences linked together in a sequential concatenation.

[0084] As used herein, the phrases “target sequence” and “sequence of interest” are used interchangeably. Target sequence is used to mean the nucleic acid sequence that is selected for alteration (e.g., suppression) of expression, and is not limited to polynucleotides encoding polypeptides. The target sequence comprises a sequence that is substantially or fully complementary to the miRNA. The target sequence includes, but is not limited to, RNA, DNA, or a polynucleotide comprising the target sequence. As discussed in Bartel and Bartel (2003) Plant Phys. 132:709-719, most microRNA sequences are 20-22 nucleotides with anywhere from 0-3 mismatches when compared to their target sequences.

[0085] It is understood that microRNA sequences, such as the 21 nucleotide sequences of the present invention, may still be functional as shorter (20 nucleotide) or longer (22 nucleotide) sequences. In addition, some nucleotide substitutions, particularly at the last two nucleotides of the 3′ end of the microRNA sequence, may be useful in retaining at least some microRNA function.

[0086] As used herein, “nucleic acid” means a polynucleotide and includes single or double-stranded polymer of deoxyribonucleotide or ribonucleotide bases. Nucleic acids may also include fragments and modified nucleotides. Thus, the terms “polynucleotide”, “nucleic acid sequence”, “nucleotide sequence” or “nucleic acid fragment” are used interchangeably and is a polymer of RNA or DNA that is single- or double-stranded, optionally containing synthetic, non-natural or altered nucleotide bases. Nucleotides (usually found in their 5′-monophosphate form) are referred to by their single letter designation as follows: “A” for adenylate or deoxyadenylate (for RNA or DNA, respectively), “C” for cytidylate or deosycytidylate, “G” for guanylate or deoxyguanylate, “U” for uridlate, “T” for deosythymidylate, “R” for purines (A or G), “Y” for pyrimidiens (Cor T), “K” for G or T, “H” for A or C or T, “I” for inosine, and “N” for any nucleotide.

[0087] By “nucleic acid library” is meant a collection of isolated DNA or RNA molecules which comprise and substantially represent the entire transcribed fraction of a genome of a specified organism or of a tissue from that organism. Construction of exemplary nucleic acid libraries, such as genomic and cDNA libraries, is taught in standard molecular biology references such as Berger and Kimmel, Guide to Molecular Cloning Techniques, Methods in Enzymology, Vol. 152, Academic Press, Inc., San Diego, Calif. (Berger); Sambrook et al., Molecular Cloning—A Laboratory Manual, 2nd ed., Vol. 1-3 (1989); and Current Protocols in Molecular Biology, F. M. Ausubel et al., Eds., Current Protocols, a joint venture between Greene Publishing Associates, Inc. and John Wiley & Sons, Inc. (1994).

[0088] As used herein “operably linked” includes reference to a functional linkage of at least two sequences. Operably linked includes linkage between a promoter and a second sequence, wherein the promoter sequence initiates and mediates transcription of the DNA sequence corresponding to the second sequence.

[0089] As used herein, “plant” includes plants and plant parts including but not limited to plant cells, plant tissue such as leaves, stems, roots, flowers, and seeds.

[0090] As used herein, “polypeptide” means proteins, protein fragments, modified proteins, amino acid sequences and synthetic amino acid sequences. The polypeptide can be glycosylated or not.

[0091] As used herein, “promoter” refers to a nucleic acid fragment, e.g., a region of DNA, that is involved in recognition and binding of an RNA polymerase and other proteins to initiate transcription. In other words, this nucleic acid fragment is capable of controlling transcription of another nucleic acid fragment.

[0092] The term “selectively hybridizes” includes reference to hybridization, under stringent hybridization conditions, of a nucleic acid sequence to a specified nucleic acid target sequence to a detectably greater degree (e.g., at least 2-fold over background) than its hybridization to non-target nucleic acid sequences and to the substantial exclusion of non-target nucleic acids. Selectively hybridizing sequences typically have about at least 80% sequence identity, or 90% sequence identity, up to and including 100% sequence identity (i.e., fully complementary) with each other.

[0093] The term “stringent conditions” or “stringent hybridization conditions” includes reference to conditions under which a probe will selectively hybridize to its target sequence. Stringent conditions are sequence-dependent and will be different in different circumstances. By controlling the stringency of the hybridization and/or washing conditions, target sequences can be identified which are 100% complementary to the probe (homologous probing). Alternatively, stringency conditions can be adjusted to allow some mismatching in sequences so that lower degrees of similarity are detected (heterologous probing). Generally, a probe is less than about 1000 nucleotides in length, optionally less than 500 nucleotides in length.

[0094] Typically, stringent conditions will be those in which the salt concentration is less than about 1.5 M Na ion, typically about 0.01 to 1.0 M Na ion concentration (or other salts) at pH 7.0 to 8.3 and the temperature is at least about 30° C. for short probes (e.g., 10 to 50 nucleotides) and at least about 60° C. for long probes (e.g., greater than 50 nucleotides). Stringent conditions may also be achieved with the addition of destabilizing agents such as formamide. Exemplary low stringency conditions include hybridization with a buffer solution of 30 to 35% formamide, 1 M NaCl, 1% SDS (sodium dodecyl sulphate) at 37° C., and a wash in 1× to 2×SSC (20×SSC=3.0 M NaCl/0.3 M trisodium citrate) at 50 to 55° C. Exemplary moderate stringency conditions include hybridization in 40 to 45% formamide, 1 M NaCl, 1% SDS at 37° C., and a wash in 0.5× to 1×SSC at 55 to 60° C. Exemplary high stringency conditions include hybridization in 50% formamide, 1 M NaCl, 1% SDS at 37° C., and a wash in 0.1×SSC at 60 to 65° C.

[0095] Specificity is typically the function of post-hybridization washes, the critical factors being the ionic strength and temperature of the final wash solution. For DNA-DNA hybrids, the Tₘ can be approximated from the equation of Meinkoth and Wahl, Anal. Biochem., 138:267-284 (1984): Tₘ=81.5° C.+16.6 (log M)+0.41 (% GC)-0.61 (% form)-500/L; where M is the molarity of monovalent cations, % GC is the percentage of guanosine and cytosine nucleotides in the DNA, % form is the percentage of formamide in the hybridization solution, and L is the length of the hybrid in base pairs. The Tₘ is the temperature (under defined ionic strength and pH) at which 50% of a complementary target sequence hybridizes to a perfectly matched probe. Tₘ is reduced by about 1° C. for each 1% of mismatching; thus, Tₘ, hybridization and/or wash conditions can be adjusted to hybridize to sequences of the desired identity. For example, if sequences with >90% identity are sought, the Tₘ can be decreased 10° C. Generally, stringent conditions are selected to be about 5° C. lower than the thermal melting point (Tₘ) for the specific sequence and its complement at a defined ionic strength and pH. However, severely stringent conditions can utilize a hybridization and/or wash at 1, 2, 3, or 4° C. lower than the thermal melting point (Tₘ); moderately stringent conditions can utilize a hybridization and/or wash at 6, 7, 8, 9, or 10° C. lower than the thermal melting point (Tₘ); low stringency conditions can utilize a hybridization and/or wash at 11, 12, 13, 14, 15, or 20° C. lower than the thermal melting point (Tₘ). Using the equation, hybridization and wash compositions, and desired Tₘ, those of ordinary skill will understand that variations in the stringency of hybridization and/or wash solutions are inherently described. If the desired degree of mismatching results in a Tₘ of less than 45° C. (aqueous solution) or 32° C. (formamide solution) it is preferred to increase the SSC concentration so that a higher temperature can be used. An extensive guide to the hybridization of nucleic acids is found in Tijssen, Laboratory Techniques in Biochemistry and Molecular Biology—Hybridization with Nucleic Acid Probes, Part I, Chapter 2 “Overview of principles of hybridization and the strategy of nucleic acid probe assays”, Elsevier, New York (1993); and Current Protocols in Molecular Biology, Chapter 2, Ausubel et al., Eds., Greene Publishing and Wiley-Interscience, New York (1995). Hybridization and/or wash conditions can be applied for at least 10, 30, 60, 90, 120, or 240 minutes.

[0096] The terms “reliable detection” and “reliably detected” are defined herein to mean the reproducible detection of measurable, sequence-specific signal intensity above background noise.

[0097] As used herein, “transgenic” refers to a plant or a cell which comprises within its genome a heterologous polynucleotide. Preferably, the heterologous polynucleotide is stably integrated within the genome such that the polynucleotide is passed on, or heritable, to successive generations. The heterologous polynucleotide may be integrated into the genome alone or as part of an expression construct. Transgenic is used herein to include any cell, cell line, callus, tissue, plant part or plant, the genotype of which has been altered by the presence of heterologous nucleic acid including those transgenics initially so altered as well as those created by sexual crosses or asexual propagation from the initial transgenic. The term “transgenic” as used herein does not encompass the alteration of the genome (chromosomal or extra-chromosomal) by conventional plant breeding methods or by naturally occurring events such as random cross-fertilization, non-recombinant viral infection, non-recombinant bacterial transformation, non-recombinant transposition, or spontaneous mutation.

[0098] As used herein, “vector” refers to a small nucleic acid molecule (plasmid, virus, bacteriophage, artificial or cut DNA molecule) that can be used to deliver a polynucleotide of the invention into a host cell. Vectors are capable of being replicated and contain cloning sites for introduction of a foreign polynucleotide, Thus, expression vectors permit transcription of a nucleic acid inserted therein.

[0099] Polynucleotide sequences may have substantial identity, substantial homology, or substantial complementarity to the selected region of the target gene. As used herein “substantial identity” and “substantial homology” indicate sequences that have sequence identity or homology to each other. Generally, sequences that are substantially identical or substantially homologous will have about 75%, 80%, 85%, 90%, 95%, or 100% sequence identity wherein the percent sequence identity is based on the entire sequence and is determined by GAP alignment using default parameters (GCG, GAP version 10, Accelrys, San Diego, Calif.). GAP uses the algorithm of Needleman and Wunsch (J. Mol. Biol. 48:443-453, 1970) to find the alignment of two complete sequences that maximizes the number of matches and minimizes the number of sequence gaps. Sequences which have 100% identity are identical. “Substantial complementarity” refers to sequences that are complementary to each other, and are able to base pair with each other. In describing complementary sequences, if all the nucleotides in the first sequence will base pair to the second sequence, these sequences are fully or completely complementary.

[0100] The present invention relates, inter alia, to an isolated polynucleotide comprising: a microRNA selected from the group consisting of SEQ ID NOs:1-2652 and SEQ ID NOs:7959-8114.

[0101] In a second embodiment, the invention relates to a full-length complement of the microRNA of selected from the group consisting of SEQ ID NOs:1-2652 and SEQ ID NOs:7959-8114, or a nucleotide sequence capable of hybridizing to these aforemention microRNAs. wherein the hybridizable nucleotide sequence comprises at least 21 nucleotides.

[0102] In a third embodiment, the invention relates to an isolated polynucleotide useful for altering plant gene expression comprising SEQ ID NO:7957 or SEQ ID NO:8427 wherein said isolated polynucleotide comprises at least one functional domain having at least 21(x) contiguous nucleotides and x is an integer from 1 to 2652, further wherein said nucleotides start at nucleotide 1 or any nucleotide 21(x)+1.

[0103] In a fourth embodiment, the invention relates to a functional subdomain of such isolated polynucleotides, wherein said functional subdomain comprises at least one microRNA.

[0104] In a fifth embodiment, the invention relates to an isolated polynucleotide comprising: a microRNA containing sequence selected from the group consisting of SEQ ID NOs:5305-7956 and SEQ ID NOs:8271-8426.

[0105] Computational identification of miRNAs was accomplished from size selected small RNA libraries from leaf, drought-stressed leaf, seed, and various other tissues.

[0106] In some embodiments, the miRNA template, (i.e. the polynucleotide encoding the miRNA), and thereby the miRNA, may comprise some mismatches relative to the target sequence. In some embodiments the miRNA template has >1 nucleotide mismatch as compared to the target sequence, for example, the miRNA template can have 1, 2, 3, 4, 5, or more mismatches as compared to the target sequence. This degree of mismatch may also be described by determining the percent identity of the miRNA template to the complement of the target sequence. For example, the miRNA template may have a percent identity including about at least 70%, 75%, 77%, 78%, 79%, 80%, 81%, 82%, 83%, 84%, 85%, 86%, 87%, 88%, 89%, 90%, 91%, 92%, 93%, 94%, 95%, 96%, 97%, 98%, 99%, or 100% as compared to the complement of the target sequence.

[0107] In some embodiments, the miRNA template, (i.e. the polynucleotide encoding the miRNA) and thereby the miRNA, may comprise some mismatches relative to the miRNA backside. In some embodiments the miRNA template has ≧1 nucleotide mismatch as compared to the miRNA backside, for example, the miRNA template can have 1, 2, 3, 4, 5, or more mismatches as compared to the miRNA backside. This degree of mismatch may also be described by determining the percent identity of the miRNA template to the complement of the miRNA backside. For example, the miRNA template may have a percent identity including about at least 70%, 75%, 77%, 78%, 79%, 80%, 81%, 82%, 83%, 84%, 85%, 86%, 87%, 88%, 89%, 90%, 91%, 92%, 93%, 94%, 95%, 96%, 97%, 98%, 99%, or 100% as compared to the complement of the miRNA backside.

[0108] In some embodiments, the target sequence is selected from a plant pathogen. Plants or cells comprising a miRNA directed to the target sequence of the pathogen are expected to have decreased sensitivity and/or increased resistance to the pathogen. In some embodiments, the miRNA is encoded by a nucleic acid construct further comprising an operably linked promoter. In some embodiments, the promoter is a pathogen-inducible promoter.

[0109] In another embodiment, there is provided a nucleic acid construct for suppressing a target sequence. The nucleic acid construct encodes a miRNA substantially complementary to the target. In some embodiments, the nucleic acid construct further comprises a promoter operably linked to the polynucleotide encoding the miRNA. In some embodiments, the nucleic acid construct lacking a promoter is designed and introduced in such a way that it becomes operably linked to a promoter upon integration in the host genome. In some embodiments, the nucleic acid construct is integrated using recombination, including site-specific recombination. See, for example, WO 99/25821, herein incorporated by reference. In some embodiments, the nucleic acid construct is an RNA. In some embodiments, the nucleic acid construct comprises at least one recombination site, including site-specific recombination sites. In some embodiments the nucleic acid construct comprises at least one recombination site in order to facilitate integration, modification, or cloning of the construct. In some embodiments the nucleic acid construct comprises two site-specific recombination sites flanking the miRNA precursor. In some embodiments the site-specific recombination sites include FRT sites, lox sites, or att sites, including attB, attL, attP or attR sites. See, for example, WO 99/25821, and U.S. Pat. Nos. 5,888,732, 6,143,557, 6,171,861, 6,270,969, and 6,277,608, herein incorporated by reference.

[0110] In a sixth embodiment, the invention relates to a DNA expression construct comprising any of the isolated polynucleotides discussed herein operably linked to at least one regulatory sequence.

[0111] In a seventh embodiment, the invention relates to a plant comprising in its genome the DNA expression constructs discussed herein. Such plants can be selected from the group consisting of corn, rice, sorghum, sunflower, millet, soybean, canola, wheat, barley, oat, beans, and nuts.

[0112] In a eighth embodiment, the invention relates to transgenic seeds obtained from a plant comprising in its genome the DNA expression constructs discussed herein. Also within the scope of the invention are transformed plant tissue or a plant cell comprising in its genome the DNA expression constructs discussed herein.

[0113] In an ninth embodiment, the invention relates to by-products and progeny plants obtained from such transgenic seeds.

[0114] In another embodiment, the nucleic acid construct comprises an isolated polynucleotide comprising a polynucleotide which encodes a modified plant miRNA precursor, the modified precursor comprising a first and a second oligonucleotide, wherein at least one of the first or the second oligonucleotides is heterologous to the precursor, wherein the first oligonucleotide is substantially complementary to the second oligonucleotide, and the second oligonucleotide comprises a miRNA substantially complementary to the target sequence, wherein the precursor is capable of forming a hairpin.

[0115] In some embodiments there are provided cells, plants, and seeds comprising the introduced polynucleotides, and/or produced by the methods of the invention. The cells include prokaryotic and eukaryotic cells, including but not limited to bacteria, yeast, fungi, viral, invertebrate, vertebrate, and plant cells. Plants, plant cells, and seeds of the invention include gynosperms, monocots and dicots, including but not limited to, for example, rice, wheat, oats, barley, millet, sorghum, soy, sunflower, safflower, canola, alfalfa, cotton, Arabidopsis, and tobacco.

[0116] As used herein, “by-products” refer to any product, fraction, or material produced from the processing of the seed. Corn kernels (seeds) are subjected to both wet and dry milling. The goal of both processes is to separate the germ, the endosperm, and the pericarp (hull). Wet milling separates the chemical constituents of corn into starch, protein, oil, and fiber fractions.

[0117] The present invention concerns methods and compositions useful in suppression of a target sequence and/or validation of function. The invention also relates to a method for using microRNA (miRNA) mediated RNA interference (RNAi) to silence or suppress a target sequence to evaluate function, or to validate a target sequence for phenotypic effect and/or trait development. Specifically, the invention relates to constructs comprising small nucleic acid molecules, miRNAs, capable of inducing silencing, and methods of using these miRNAs to selectively silence target sequences.

[0118] RNA interference refers to the process of sequence-specific post-transcriptional gene silencing in animals mediated by short interfering RNAs (siRNAs) (Fire et al., Nature 391:806 1998). The corresponding process in plants is commonly referred to as post-transcriptional gene silencing (PTGS) or RNA silencing and is also referred to as quelling in fungi. The process of post-transcriptional gene silencing is thought to be an evolutionarily-conserved cellular defense mechanism used to prevent the expression of foreign genes and is commonly shared by diverse flora and phyla (Fire et al., Trends Genet. 15:358 1999). Such protection from foreign gene expression may have evolved in response to the production of double-stranded RNAs (dsRNAs) derived from viral infection or from the random integration of transposon elements into a host genome via a cellular response that specifically destroys homologous single-stranded RNA of viral genomic RNA. The presence of dsRNA in cells triggers the RNAi response through a mechanism that has yet to be fully characterized.

[0119] The presence of long dsRNAs in cells stimulates the activity of a ribonuclease III enzyme referred to as “dicer”. Dicer is involved in the processing of the dsRNA into short pieces of dsRNA known as short interfering RNAs (siRNAs) (Berstein et al., Nature 409:363 2001) and/or pre miRNAs into miRNAs. Short interfering RNAs derived from dicer activity are typically about 21 to about 23 nucleotides in length and comprise about 19 base pair duplexes (Elbashir et al., Genes Dev. 15:188 2001). Dicer has also been implicated in the excision of 21- and 22-nucleotide small temporal RNAs (stRNAs) from precursor RNA of conserved structure that are implicated in translational control (Hutvagner et al., 2001, Science 293:834). The RNAi response also features an endonuclease complex, commonly referred to as an RNA-induced silencing complex (RISC), which mediates cleavage of single-stranded RNA having sequence complementarity to the antisense strand of the siRNA duplex. Cleavage of the target RNA takes place in the middle of the region complementary to the antisense strand of the siRNA duplex (Elbashir et al., Genes Dev. 15:188 2001). In addition, RNA interference can also involve small RNA (e.g., microRNA, or miRNA) mediated gene silencing, presumably through cellular mechanisms that regulate chromatin structure and thereby prevent transcription of target gene sequences (see, e.g., Allshire, Science 297:1818-1819 2002; Volpe et al., Science 297:1833-1837 2002; Jenuwein, Science 297:2215-2218 2002; and Hall et al., Science 297:2232-2237 2002). As such, miRNA molecules of the invention can be used to mediate gene silencing via interaction with RNA transcripts or alternately by interaction with particular gene sequences, wherein such interaction results in gene silencing either at the transcriptional or post-transcriptional level.

[0120] RNAi has been studied in a variety of systems. Fire et al. (Nature 391:806 1998) were the first to observe RNAi in C. elegans. Wianny and Goetz (Nature Cell Biol. 2:70 1999) describe RNAi mediated by dsRNA in mouse embryos. Hammond et al. (Nature 404:293 2000) describe RNAi in Drosophila cells transfected with dsRNA. Elbashir et al., (Nature 411:494 2001) describe RNAi induced by introduction of duplexes of synthetic 21-nucleotide RNAs in cultured mammalian cells including human embryonic kidney and HeLa cells.

[0121] Small RNAs play an important role in controlling gene expression. Regulation of many developmental processes, including flowering, is controlled by small RNAs. It is now possible to engineer changes in gene expression of plant genes by using transgenic constructs which produce small RNAs in the plant.

[0122] Small RNAs appear to function by base-pairing to complementary RNA or DNA target sequences. When bound to RNA, small RNAs trigger either RNA cleavage or translational inhibition of the target sequence. When bound to DNA target sequences, it is thought that small RNAs can mediate DNA methylation of the target sequence. The consequence of these events, regardless of the specific mechanism, is that gene expression is inhibited.

[0123] MicroRNAs (miRNAs) are noncoding RNAs of about 19 to about 24 nucleotides (nt) in length that have been identified in both animals and plants (Lagos-Quintana et al., Science 294:853-858 2001, Lagos-Quintana et al., Curr. Biol. 12:735-739 2002; Lau et al., Science 294:858-862 2001; Lee and Ambros, Science 294:862-864 2001; Llave et al., Plant Cell 14:1605-1619 2002; Mourelatos et al., Genes. Dev. 16:720-728 2002; Park et al., Curr. Biol. 12:1484-1495 2002; Reinhart et al., Genes. Dev. 16:1616-1626 2002). They are processed from longer precursor transcripts that range in size from approximately 70 to 200 nt, and these precursor transcripts have the ability to form stable hairpin structures. In animals, the enzyme involved in processing miRNA precursors is called Dicer, an RNAse III-like protein (Grishok et al., Cell 106:23-34 2001; Hutvagner et al., Science 293:834-838 2001; Ketting et al., Genes. Dev. 15:2654-2659 2001). Plants also have a Dicer-like enzyme, DCL1 (previously named CARPEL FACTORY/SHORT INTEGUMENTS1/SUSPENSOR1), and recent evidence indicates that it, like Dicer, is involved in processing the hairpin precursors to generate mature miRNAs (Park et al., Curr. Biol. 12:1484-1495 2002; Reinhart et al., Genes. Dev. 16:1616-1626 2002). Furthermore, it is becoming clear from recent work that at least some miRNA hairpin precursors originate as longer polyadenylated transcripts, and several different miRNAs and associated hairpins can be present in a single transcript (Lagos-Quintana et al., Science 294:853-858 2001; Lee et al., EMBO J. 21:4663-4670 2002). Recent work has also examined the selection of the miRNA strand from the dsRNA product arising from processing of the hairpin by DICER (Schwartz et al., 2003, Cell 115:199-208). It appears that the stability (i.e. G:C vs. A:U content, and/or mismatches) of the two ends of the processed dsRNA affects the strand selection, with the low stability end being easier to unwind by a helicase activity. The 5′ end strand at the low stability end is incorporated into the RISC complex, while the other strand is degraded.

[0124] In animals, there is direct evidence indicating a role for specific miRNAs in development. The lin-4 and let-7 miRNAs in C. elegans have been found to control temporal development, based on the phenotypes generated when the genes producing the lin-4 and let-7 miRNAs are mutated (Lee et al., Cell 75:843-854 1993; Reinhart et al., Nature 403-901-906 2000). In addition, both miRNAs display a temporal expression pattern consistent with their roles in developmental timing. Other animal miRNAs display developmentally regulated patterns of expression, both temporal and tissue-specific (Lagos-Quintana et al., Science 294:853-853 2001, Lagos-Quintana et al., Curr. Biol. 12:735-739 2002; Lau et al., Science 294:858-862 2001; Lee and Ambros, Science 294:862-864 2001), leading to the hypothesis that miRNAs may, in many cases, be involved in the regulation of important developmental processes. Likewise, in plants, the differential expression patterns of many miRNAs suggests a role in development (Llave et al., Plant Cell 14:1605-1619 2002; Park et al., Curr. Biol. 12:1484-1495 2002; Reinhart et al., Genes. Dev. 16:1616-1626 2002). However, a developmental role for miRNAs has not been directly proven in plants, because to date there has been no report of a developmental phenotype associated with a specific plant miRNA.

[0125] MicroRNAs appear to regulate target genes by binding to complementary sequences located in the transcripts produced by these genes. In the case of lin-4 and let-7, the target sites are located in the 3′ UTRs of the target mRNAs (Lee et al., Cell 75:843-854 1993; Wightman et al., Cell 75:855-862 1993; Reinhart et al., Nature 403:901-906 2000; Slack et al., Mol. Cell. 5:659-669 2000), and there are several mismatches between the lin-4 and let-7 miRNAs and their target sites. Binding of the lin-4 or let-7 miRNA appears to cause downregulation of steady-state levels of the protein encoded by the target mRNA without affecting the transcript itself (Olsen and Ambros, Dev. Biol. 216:671-680 1999). On the other hand, recent evidence suggests that miRNAs can, in some cases, cause specific RNA cleavage of the target transcript within the target site, and this cleavage step appears to require 100% complementarity between the miRNA and the target transcript (Hutvagner and Zamore, Science 297:2056-2060 2002; Llave et al., Plant Cell 14:1605-1619 2002). It seems likely that miRNAs can enter at least two pathways of target gene regulation: Protein downregulation when target complementarity is <100%, and RNA cleavage when target complementarity is 100%. MicroRNAs entering the RNA cleavage pathway are analogous to the 21-25 nt short interfering RNAs (siRNAs) generated during RNA interference (RNAi) in animals and posttranscriptional gene silencing (PTGS) in plants (Hamilton and Baulcombe 1999; Hammond et al., 2000; Zamore et al., 2000; Elbashir et al., 2001), and likely are incorporated into an RNA-induced silencing complex (RISC) that is similar or identical to that seen for RNAi.

[0126] Identifying the targets of miRNAs with bioinformatics has not been successful in animals, and this is probably due to the fact that animal miRNAs have a low degree of complementarity with their targets. On the other hand, bioinformatic approaches have been successfully used to predict targets for plant miRNAs (Llave et al., Plant Cell 14:1605-1619 2002; Park et al., Curr. Biol. 12:1484-1495 2002; Rhoades et al., Cell 110:513-520 2002), and thus it appears that plant miRNAs have higher overall complementarity with their putative targets than do animal miRNAs. Most of these predicted target transcripts of plant miRNAs encode members of transcription factor families implicated in plant developmental patterning or cell differentiation. Nonetheless, biological function has not been directly demonstrated for any plant miRNA. Although Llave et al. (Science 297:2053-2056 2002) have shown that a transcript for a SCARECROW-like transcription factor is a target of the Arabidopsis miRNA mir171, these studies were performed in a heterologous species and no plant phenotype associated with mir171 was reported.

[0127] The methods provided can be practiced in any organism in which a method of transformation is available, and for which there is at least some sequence information for the target sequence, or for a region flanking the target sequence of interest. It is also understood that two or more sequences could be targeted by sequential transformation, co-transformation with more than one targeting vector, or the construction of a DNA construct comprising more than one miRNA sequence. The methods of the invention may also be implemented by a combinatorial nucleic acid library construction in order to generate a library of miRNAs directed to random target sequences. The library of miRNAs could be used for high-throughput screening for gene function validation.

[0128] General categories of sequences of interest include, for example, those genes involved in regulation or information, such as zinc fingers, transcription factors, homeotic genes, or cell cycle and cell death modulators, those involved in communication, such as kinases, and those involved in housekeeping, such as heat shock proteins.

[0129] Target sequences further include coding regions and non-coding regions such as promoters, enhancers, terminators, introns and the like, which may be modified in order to alter the expression of a gene of interest. For example, an intron sequence can be added to the 5′ region to increase the amount of mature message that accumulates (see for example Buchman and Berg, Mol. Cell. Biol. 8:4395-4405 (1988); and Callis et al., Genes Dev. 1:1183-1200 (1987)).

[0130] The target sequence may be an endogenous sequence, or may be an introduced heterologous sequence, or transgene. For example, the methods may be used to alter the regulation or expression of a transgene, or to remove a transgene or other introduced sequence such as an introduced site-specific recombination site. The target sequence may also be a sequence from a pathogen, for example, the target sequence may be from a plant pathogen such as a virus, a mold or fungus, an insect, or a nematode. A miRNA could be expressed in a plant which, upon infection or infestation, would target the pathogen and confer some degree of resistance to the plant.

[0131] In plants, other categories of target sequences include genes affecting agronomic traits, insect resistance, disease resistance, herbicide resistance, sterility, grain characteristics, and commercial products. Genes of interest also included those involved in oil, starch, carbohydrate, or nutrient metabolism as well as those affecting, for example, kernel size, sucrose loading, and the like. The quality of grain is reflected in traits such as levels and types of oils, saturated and unsaturated, quality and quantity of essential amino acids, and levels of cellulose. For example, genes of the phytic acid biosynthetic pathway could be suppressed to generate a high available phosphorous phenotype. See, for example, phytic acid biosynthetic enzymes including inositol polyphosphate kinase-2 polynucleotides, disclosed in WO 02/059324, inositol 1,3,4-trisphosphate 5/6-kinase polynucleotides, disclosed in WO 03/027243, and myo-inositol 1-phosphate synthase and other phytate biosynthetic polynucleotides, disclosed in WO 99/05298, all of which are herein incorporated by reference. Genes in the lignification pathway could be suppressed to enhance digestibility or energy availability. Genes affecting cell cycle or cell death could be suppressed to affect growth or stress response. Genes affecting DNA repair and/or recombination could be suppressed to increase genetic variability. Genes affecting flowering time could be suppressed, as well as genes affecting fertility. Any target sequence could be suppressed in order to evaluate or confirm its role in a particular trait or phenotype, or to dissect a molecular, regulatory, biochemical, or proteomic pathway or network.

[0132] A number of promoters can be used, these promoters can be selected based on the desired outcome. It is recognized that different applications will be enhanced by the use of different promoters in plant expression cassettes to modulate the timing, location and/or level of expression of the miRNA. Such plant expression cassettes may also contain, if desired, a promoter regulatory region (e.g., one conferring inducible, constitutive, environmentally- or developmentally-regulated, or cell- or tissue-specific/selective expression), a transcription initiation start site, a ribosome binding site, an RNA processing signal, a transcription termination site, and/or a polyadenylation signal.

[0133] Constitutive, tissue-preferred or inducible promoters can be employed. Examples of constitutive promoters include the cauliflower mosaic virus (CaMV) 35S transcription initiation region, the 1′- or 2′-promoter derived from T-DNA of Agrobacterium tumefaciens, the ubiquitin 1 promoter, the Smas promoter, the cinnamyl alcohol dehydrogenase promoter (U.S. Pat. No. 5,683,439), the Nos promoter, the pEmu promoter, the rubisco promoter, the GRP1-8 promoter and other transcription initiation regions from various plant genes known to those of skill. If low level expression is desired, weak promoter(s) may be used. Weak constitutive promoters include, for example, the core promoter of the Rsyn7 promoter (WO 99/43838 and U.S. Pat. No. 6,072,050), the core 35S CaMV promoter, and the like. Other constitutive promoters include, for example, U.S. Pat. Nos. 5,608,149; 5,608,144; 5,604,121; 5,569,597; 5,466,785; 5,399,680; 5,268,463; and 5,608,142. See also, U.S. Pat. No. 6,177,611, herein incorporated by reference.

[0134] Examples of inducible promoters are the Adh1 promoter which is inducible by hypoxia or cold stress, the Hsp70 promoter which is inducible by heat stress, the PPDK promoter and the pepcarboxylase promoter which are both inducible by light. Also useful are promoters which are chemically inducible, such as the In2-2 promoter which is safener induced (U.S. Pat. No. 5,364,780), the ERE promoter which is estrogen induced, and the Axig1 promoter which is auxin induced and tapetum specific but also active in callus (PCT US01/22169).

[0135] Examples of promoters under developmental control include promoters that initiate transcription preferentially in certain tissues, such as leaves, roots, fruit, seeds, or flowers. An exemplary promoter is the anther specific promoter 5126 (U.S. Pat. Nos. 5,689,049 and 5,689,051). Examples of seed-preferred promoters include, but are not limited to, 27 kD gamma zein promoter and waxy promoter, Boronat, A. et al. (1986) Plant Sci. 47:95-102; Reina, M. et al. Nucl. Acids Res. 18(21):6426; and Kloesgen, R. B. et al. (1986) Mol. Gen. Genet. 203:237-244. Promoters that express in the embryo, pericarp, and endosperm are disclosed in U.S. Pat. No. 6,225,529 and PCT publication WO 00/12733. The disclosures each of these are incorporated herein by reference in their entirety.

[0136] In some embodiments it will be beneficial to express the gene from an inducible promoter, particularly from a pathogen-inducible promoter. Such promoters include those from pathogenesis-related proteins (PR proteins), which are induced following infection by a pathogen; e.g., PR proteins, SAR proteins, beta-1,3-glucanase, chitinase, etc. See, for example, Redolfi et al. (1983) Neth. J. Plant Pathol. 89:245-254; Uknes et al. (1992) Plant Cell 4:645-656; and Van Loon (1985) Plant Mol. Virol. 4:111-116. See also WO 99/43819, herein incorporated by reference.

[0137] Of interest are promoters that are expressed locally at or near the site of pathogen infection. See, for example, Marineau et al. (1987) Plant Mol. Biol. 9:335-342; Matton et al. (1989) Molecular Plant-Microbe Interactions 2:325-331; Somsisch et al. (1986) Proc. Natl. Acad. Sci. USA 83:2427-2430; Somsisch et al. (1988) Mol. Gen. Genet. 2:93-98; and Yang (1996) Proc. Natl. Acad. Sci. USA 93:14972-14977. See also, Chen et al. (1996) Plant J. 10:955-966; Zhang et al. (1994) Proc. Natl. Acad. Sci. USA 91:2507-2511; Warner et al. (1993) Plant J. 3:191-201; Siebertz et al. (1989) Plant Cell 1:961-968; U.S. Pat. No. 5,750,386 (nematode-inducible); and the references cited therein. Of particular interest is the inducible promoter for the maize PRms gene, whose expression is induced by the pathogen Fusarium moniliforme (see, for example, Cordero et al. (1992) Physiol. Mol. Plant. Path. 41:189-200).

[0138] Additionally, as pathogens find entry into plants through wounds or insect damage, a wound-inducible promoter may be used in the constructions of the polynucleotides. Such wound-inducible promoters include potato proteinase inhibitor (pin II) gene (Ryan (1990) Ann. Rev. Phytopath. 28:425-449; Duan et al. (1996) Nature Biotech. 14:494-498); wun1 and wun2, U.S. Pat. No. 5,428,148; win1 and win2 (Stanford et al. (1989) Mol. Gen. Genet. 215:200-208); systemin (McGurl et al. (1992) Science 225:1570-1573); WIP1 (Rohmeier et al. (1993) Plant Mol. Biol. 22:783-792; Eckelkamp et al. (1993) FEBS Lett. 323:73-76); MPI gene (Corderok et al. (1994) Plant J. 6(2):141-150); and the like, herein incorporated by reference.

[0139] Chemical-regulated promoters can be used to modulate the expression of a gene in a plant through the application of an exogenous chemical regulator. Depending upon the objective, the promoter may be a chemical-inducible promoter, where application of the chemical induces gene expression, or a chemical-repressible promoter, where application of the chemical represses gene expression. Chemical-inducible promoters are known in the art and include, but are not limited to, the maize In2-2 promoter, which is activated by benzenesulfonamide herbicide safeners, the maize GST promoter, which is activated by hydrophobic electrophilic compounds that are used as pre-emergent herbicides, and the tobacco PR-1a promoter, which is activated by salicylic acid. Other chemical-regulated promoters of interest include steroid-responsive promoters (see, for example, the glucocorticoid-inducible promoter in Schena et al. (1991) Proc. Natl. Acad. Sci. USA 88:10421-10425 and McNellis et al. (1998) Plant J. 14(2):247-257) and tetracycline-inducible and tetracycline-repressible promoters (see, for example, Gatz et al. (1991) Mol. Gen. Genet. 227:229-237, and U.S. Pat. Nos. 5,814,618 and 5,789,156), herein incorporated by reference.

[0140] Tissue-preferred promoters can be utilized to target enhanced expression of a sequence of interest within a particular plant tissue. Tissue-preferred promoters include Yamamoto et al. (1997) Plant J. 12(2):255-265; Kawamata et al. (1997) Plant Cell Physiol. 38(7):792-803; Hansen et al. (1997) Mol. Gen. Genet. 254(3):337-343; Russell et al. (1997) Transgenic Res. 6(2):157-168; Rinehart et al. (1996) Plant Physiol. 112(3):1331-1341; Van Camp et al. (1996) Plant Physiol. 112(2):525-535; Canevascini et al. (1996) Plant Physiol. 112(2):513-524; Yamamoto et al. (1994) Plant Cell Physiol. 35(5):773-778; Lam (1994) Results Probl. Cell Differ. 20:181-196; Orozco et al. (1993) Plant Mol. Biol. 23(6):1129-1138; Matsuoka et al. (1993) Proc Natl. Acad. Sci. USA 90(20):9586-9590; and Guevara-Garcia et al. (1993) Plant J. 4(3):495-505. Such promoters can be modified, if necessary, for weak expression.

[0141] Leaf-preferred promoters are known in the art. See, for example, Yamamoto et al. (1997) Plant J. 12(2):255-265; Kwon et al. (1994) Plant Physiol. 105:357-67; Yamamoto et al. (1994) Plant Cell Physiol. 35(5):773-778; Gotor et al. (1993) Plant J. 3:509-18; Orozco et al. (1993) Plant Mol. Biol. 23(6):1129-1138; and Matsuoka et al. (1993) Proc. Natl. Acad. Sci. USA 90(20):9586-9590. In addition, the promoters of cab and rubisco can also be used. See, for example, Simpson et al. (1958) EMBO J. 4:2723-2729 and Timko et al. (1988) Nature 318:57-58.

[0142] Root-preferred promoters are known and can be selected from the many available from the literature or isolated de novo from various compatible species. See, for example, Hire et al. (1992) Plant Mol. Biol. 20(2):207-218 (soybean root-specific glutamine synthetase gene); Keller and Baumgartner (1991) Plant Cell 3(10):1051-1061 (root-specific control element in the GRP 1.8 gene of French bean); Sanger et al. (1990) Plant Mol. Biol. 14(3):433-443 (root-specific promoter of the mannopine synthase (MAS) gene of Agrobacterium tumefaciens); and Miao et al. (1991) Plant Cell 3(1):11-22 (full-length cDNA clone encoding cytosolic glutamine synthetase (GS), which is expressed in roots and root nodules of soybean). See also Bogusz et al. (1990) Plant Cell 2(7):633-641, where two root-specific promoters isolated from hemoglobin genes from the nitrogen-fixing nonlegume Parasponia andersonii and the related non-nitrogen-fixing nonlegume Trema tomentosa are described. The promoters of these genes were linked to a β-glucuronidase reporter gene and introduced into both the nonlegume Nicotiana tabacum and the legume Lotus corniculatus, and in both instances root-specific promoter activity was preserved. Leach and Aoyagi (1991) describe their analysis of the promoters of the highly expressed roIC and roID root-inducing genes of Agrobacterium rhizogenes (see Plant Science (Limerick) 79(1):69-76). They concluded that enhancer and tissue-preferred DNA determinants are dissociated in those promoters. Teeri et al. (1989) used gene fusion to lacZ to show that the Agrobacterium T-DNA gene encoding octopine synthase is especially active in the epidermis of the root tip and that the TR2′ gene is root specific in the intact plant and stimulated by wounding in leaf tissue, an especially desirable combination of characteristics for use with an insecticidal or larvicidal gene (see EMBO J. 8(2):343-350). The TR1′ gene, fused to nptII (neomycin phosphotransferase II) showed similar characteristics. Additional root-preferred promoters include the VfENOD-GRP3 gene promoter (Kuster et al. (1995) Plant Mol. Biol. 29(4):759-772); and roIB promoter (Capana et al. (1994) Plant Mol. Biol. 25(4):681-691. See also U.S. Pat. Nos. 5,837,876; 5,750,386; 5,633,363; 5,459,252; 5,401,836; 5,110,732; and 5,023,179. The phaseolin gene (Murai et al. (1983) Science 23:476-482 and Sengopta-Gopalen et al. (1988) PNAS 82:3320-3324.

[0143] Transformation protocols as well as protocols for introducing nucleotide sequences into plants may vary depending on the type of plant or plant cell, i.e., monocot or dicot, targeted for transformation. Suitable methods of introducing the DNA construct include microinjection (Crossway et al. (1986) Biotechniques 4:320-334; and U.S. Pat. No. 6,300,543), sexual crossing, electroporation (Riggs et al. (1986) Proc. Natl. Acad. Sci. USA 83:5602-5606), Agrobacterium-mediated transformation (Townsend et al., U.S. Pat. No. 5,563,055; and U.S. Pat. No. 5,981,840), direct gene transfer (Paszkowski et al. (1984) EMBO J. 3:2717-2722), and ballistic particle acceleration (see, for example, Sanford et al., U.S. Pat. No. 4,945,050; Tomes et al., U.S. Pat. No. 5,879,918; Tomes et al., U.S. Pat. No. 5,886,244; Bidney et al., U.S. Pat. No. 5,932,782; Tomes et al. (1995) “Direct DNA Transfer into Intact Plant Cells via Microprojectile Bombardment,” in Plant Cell, Tissue, and Organ Culture: Fundamental Methods, ed. Gamborg and Phillips (Springer-Verlag, Berlin); and McCabe et al. (1988) Biotechnology 6:923-926). Also see Weissinger et al. (1988) Ann. Rev. Genet. 22:421-477; Sanford et al. (1987) Particulate Science and Technology 5:27-37 (onion); Christou et al. (1988) Plant Physiol. 87:671-674 (soybean); Finer and McMullen (1991) In Vitro Cell Dev. Biol. 27P:175-182 (soybean); Singh et al. (1998) Theor. Appl. Genet. 96:319-324 (soybean); Datta et al. (1990) Biotechnology 8:736-740 (rice); Klein et al. (1988) Proc. Natl. Acad. Sci. USA 85:4305-4309 (maize); Klein et al. (1988) Biotechnology 6:559-563 (maize); Tomes, U.S. Pat. No. 5,240,855; Buising et al., U.S. Pat. Nos. 5,322,783 and 5,324,646; Klein et al. (1988) Plant Physiol. 91:440-444 (maize); Fromm et al. (1990) Biotechnology 8:833-839 (maize); Hooykaas-Van Slogteren et al. (1984) Nature (London) 311:763-764; Bowen et al., U.S. Pat. No. 5,736,369 (cereals); Bytebier et al. (1987) Proc. Natl. Acad. Sci. USA 84:5345-5349 (Liliaceae); De Wet et al. (1985) in The Experimental Manipulation of Ovule Tissues, ed. Chapman et al. (Longman, New York), pp. 197-209 (pollen); Kaeppler et al. (1990) Plant Cell Reports 9:415-418 and Kaeppler et al. (1992) Theor. Appl. Genet. 84:560-566 (whisker-mediated transformation); D'Halluin et al. (1992) Plant Cell 4:1495-1505 (electroporation); Li et al. (1993) Plant Cell Reports 12:250-255 and Christou and Ford (1995) Annals of Botany 75:407-413 (rice); Osjoda et al. (1996) Nature Biotechnology 14:745-750 (maize via Agrobacterium tumefaciens); and U.S. Pat. No. 5,736,369 (meristem transformation), all of which are herein incorporated by reference.

[0144] The nucleotide constructs may be introduced into plants by contacting plants with a virus or viral nucleic acids. Generally, such methods involve incorporating a nucleotide construct of the invention within a viral DNA or RNA molecule. Further, it is recognized that useful promoters encompass promoters utilized for transcription by viral RNA polymerases. Methods for introducing nucleotide constructs into plants and expressing a protein encoded therein, involving viral DNA or RNA molecules, are known in the art. See, for example, U.S. Pat. Nos. 5,889,191, 5,889,190, 5,866,785, 5,589,367 and 5,316,931; herein incorporated by reference.

[0145] In some embodiments, transient expression may be desired. In those cases, standard transient transformation techniques may be used. Such methods include, but are not limited to viral transformation methods, and microinjection of DNA or RNA, as well other methods well known in the art.

[0146] The cells from the plants that have stably incorporated the nucleotide sequence may be grown into plants in accordance with conventional ways. See, for example, McCormick et al. (1986) Plant Cell Reports 5:81-84. These plants may then be grown, and either pollinated with the same transformed strain or different strains, and the resulting hybrid having constitutive expression of the desired phenotypic characteristic imparted by the nucleotide sequence of interest and/or the genetic markers contained within the target site or transfer cassette. Two or more generations may be grown to ensure that expression of the desired phenotypic characteristic is stably maintained and inherited and then seeds harvested to ensure expression of the desired phenotypic characteristic has been achieved.

[0147] In a tenth embodiment, the invention relates to a method for altering expression of a stably introduced nucleotide sequence in a plant comprising:
[0148] a) making a DNA expression construct comprising a stably introduced nucleotide sequence and at least one sequence capable of hybridizing to the isolated polynucleotide of the invention;
[0149] b) transforming a plant with the DNA expression construct of part (a); and
[0150] c) selecting a transformed plant which comprises the DNA expression construct of part (a) in its genome and which has altered expression of the stably introduced nucleotide sequence when compared to a plant transformed with a modified version of the DNA expression construct of part (a) wherein the modified construct lacks the sequence capable of hybridizing to the isolated polynucleotide of the invention.

[0151] Initial identification and selection of cells and/or plants comprising the DNA constructs may be facilitated by the use of marker genes. Gene targeting can be performed without selection if there is a sensitive method for identifying recombinants, for example if the targeted gene modification can be easily detected by PCR analysis, or if it results in a certain phenotype. However, in most cases, identification of gene targeting events will be facilitated by the use of markers. Useful markers include positive and negative selectable markers as well as markers that facilitate screening, such as visual markers. Selectable markers include genes carrying resistance to an antibiotic such as spectinomycin (e.g. the aada gene, Svab et al. 1990 Plant Mol. Biol. 14:197), streptomycin (e.g., aada, or SPT, Svab et al. 1990 Plant Mol. Biol. 14:197; Jones et al. 1987 Mol. Gen. Genet. 210:86), kanamycin (e.g., nptII, Fraley et al. 1983 PNAS 80:4803), hygromycin (e.g., HPT, Vanden Elzen et al. 1985 Plant Mol. Biol. 5:299), gentamycin (Hayford et al. 1988 Plant Physiol. 86:1216), phleomycin, zeocin, or bleomycin (Hille et al. 1986 Plant Mol. Biol. 7:171), or resistance to a herbicide such as phosphinothricin (bar gene), or sulfonylurea (acetolactate synthase (ALS)) (Charest et al. (1990) Plant Cell Rep. 8:643), genes that fulfill a growth requirement on an incomplete media such as HIS3, LEU2, URA3, LYS2, and TRP1 genes in yeast, and other such genes known in the art. Negative selectable markers include cytosine deaminase (codA) (Stougaard 1993 Plant J. 3:755-761), tms2 (DePicker et al. 1988 Plant Cell Rep. 7:63-66), nitrate reductase (Nussame et al. 1991 Plant J. 1:267-274), SU1 (O'Keefe et al. 1994 Plant Physiol. 105:473-482), aux-2 from the Ti plasmid of Agrobacterium, and thymidine kinase. Screenable markers include fluorescent proteins such as green fluorescent protein (GFP) (Chalfie et al., 1994 Science 263:802; U.S. Pat. No. 6,146,826; U.S. Pat. No. 5,491,084; and WO 97/41228), reporter enzymes such as β-glucuronidase (GUS) (Jefferson R. A. 1987 Plant Mol. Biol. Rep. 5:387; U.S. Pat. No. 5,599,670; and U.S. Pat. No. 5,432,081), β-galactosidase (lacZ), alkaline phosphatase (AP), glutathione S-transferase (GST) and luciferase (U.S. Pat. No. 5,674,713; and Ow et al. 1986 Science 234(4778):856-859), visual markers like anthocyanins such as CRC (Ludwig et al. (1990) Science 247(4841):449-450) R gene family (e.g. Lc, P, S), A, C, R-nj, body and/or eye color genes in Drosophila, coat color genes in mammalian systems, and others known in the art.

[0152] One or more markers may be used in order to select and screen for gene targeting events. One common strategy for gene disruption involves using a target modifying polynucleotide in which the target is disrupted by a promoterless selectable marker. Since the selectable marker lacks a promoter, random integration events are unlikely to lead to transcription of the gene. Gene targeting events will put the selectable marker under control of the promoter for the target gene. Gene targeting events are identified by selection for expression of the selectable marker. Another common strategy utilizes a positive-negative selection scheme. This scheme utilizes two selectable markers, one that confers resistance (R+) coupled with one that confers a sensitivity (S+), each with a promoter. When this polynucleotide is randomly inserted, the resulting phenotype is R+/S+. When a gene targeting event is generated, the two markers are uncoupled and the resulting phenotype is R+/S−. Examples of using positive-negative selection are found in Thykjær et al. (1997) Plant Mol. Biol. 35:523-530; and WO 01/66717, which are herein incorporated by reference.

### EXAMPLES

[0153] The following are non-limiting examples intended to illustrate the invention. Although the present invention has been described in some detail by way of illustration and example for purposes of clarity of understanding, it will be obvious that certain changes and modifications may be practiced within the scope of the appended claims.

### Example 1

### Transformation of Plants

[0154] Described in this example are methods one may use for introduction of a polynucleotide or polypeptide into a plant cell.

### A. Maize Particle-Mediated DNA Delivery

[0155] A DNA construct can be introduced into maize cells capable of growth on suitable maize culture medium. Such competent cells can be from maize suspension culture, callus culture on solid medium, freshly isolated immature embryos or meristem cells. Immature embryos of the Hi-II genotype can be used as the target cells. Ears are harvested at approximately 10 days post-pollination, and 1.2-1.5 mm immature embryos are isolated from the kernels, and placed scutellum-side down on maize culture medium.

[0156] The immature embryos are bombarded from 18-72 hours after being harvested from the ear. Between 6 and 18 hours prior to bombardment, the immature embryos are placed on medium with additional osmoticum (MS basal medium, Musashige and Skoog, 1962, Physiol. Plant 15:473-497, with 0.25 M sorbitol). The embryos on the high-osmotic medium are used as the bombardment target, and are left on this medium for an additional 18 hours after bombardment.

[0157] For particle bombardment, plasmid DNA (described above) is precipitated onto 1.8 mm tungsten particles using standard CaCl2-spermidine chemistry (see, for example, Klein et al., 1987, Nature 327:70-73). Each plate is bombarded once at 600 PSI, using a DuPont Helium Gun (Lowe et al., 1995, Bio/Technol 13:677-682). For typical media formulations used for maize immature embryo isolation, callus initiation, callus proliferation and regeneration of plants, see Armstrong, C., 1994, In “The Maize Handbook”, M. Freeling and V. Walbot, eds. Springer Verlag, NY, pp 663-671.

[0158] Within 1-7 days after particle bombardment, the embryos are moved onto N6-based culture medium containing 3 mg/l of the selective agent bialaphos. Embryos, and later callus, are transferred to fresh selection plates every 2 weeks. The calli developing from the immature embryos are screened for the desired phenotype. After 6-8 weeks, transformed calli are recovered.

### B. Soybean Transformation

[0159] Soybean embryogenic suspension cultures are maintained in 35 ml liquid media SB196 or SB172 in 250 ml Erlenmeyer flasks on a rotary shaker, 150 rpm, 26 C with cool white fluorescent lights on 16:8 hr day/night photoperiod at light intensity of 30-35 uE/m2s. Cultures are subcultured every two weeks by inoculating approximately 35 mg of tissue into 35 ml of fresh liquid media. Alternatively, cultures are initiated and maintained in 6-well Costar plates.

[0160] SB 172 media is prepared as follows: (per liter), 1 bottle Murashige and Skoog Medium (Duchefa # M 0240), 1 ml B5 vitamins 1000× stock, 1 ml 2,4-D stock (Gibco 11215-019), 60 g sucrose, 2 g MES, 0.667 g L-Asparagine anhydrous (GibcoBRL 11013-026), pH 5.7. SB 196 media is prepared as follows: (per liter) 10 ml MS FeEDTA, 10 ml MS Sulfate, 10 ml FN-Lite Halides, 10 ml FN-Lite P,B,Mo, 1 ml B5 vitamins 1000× stock, 1 ml 2,4-D, (Gibco 11215-019), 2.83 g KNO3, 0.463 g (NH4)₂SO4, 2 g MES, 1 g Asparagine Anhydrous, Powder (Gibco 11013-026), 10 g Sucrose, pH 5.8. 2,4-D stock concentration 10 mg/ml is prepared as follows: 2,4-D is solubilized in 0.1 N NaOH, filter-sterilized, and stored at −20° C. B5 vitamins 1000× stock is prepared as follows: (per 100 ml)-store aliquots at −20° C., 10 g myo-inositol, 100 mg nicotinic acid, 100 mg pyridoxine HCl, 1 g thiamin.

[0161] Soybean embryogenic suspension cultures are transformed with various plasmids by the method of particle gun bombardment (Klein et al., 1987 Nature 327:70. To prepare tissue for bombardment, approximately two flasks of suspension culture tissue that has had approximately 1 to 2 weeks to recover since its most recent subculture is placed in a sterile 60×20 mm petri dish containing 1 sterile filter paper in the bottom to help absorb moisture. Tissue (i.e. suspension clusters approximately 3-5 mm in size) is spread evenly across each petri plate. Residual liquid is removed from the tissue with a pipette, or allowed to evaporate to remove excess moisture prior to bombardment. Per experiment, 4-6 plates of tissue are bombarded. Each plate is made from two flasks.

[0162] To prepare gold particles for bombardment, 30 mg gold is washed in ethanol, centrifuged and resuspended in 0.5 ml of sterile water. For each plasmid combination (treatments) to be used for bombardment, a separate micro-centrifuge tube is prepared, starting with 50 μl of the gold particles prepared above. Into each tube, the following are also added; 5 μl of plasmid DNA (at 1 μg/μl), 50 μl CaCl2, and 20 μl 0.1 M spermidine. This mixture is agitated on a vortex shaker for 3 minutes, and then centrifuged using a microcentrifuge set at 14,000 RPM for 10 seconds. The supernatant is decanted and the gold particles with attached, precipitated DNA are washed twice with 400 μl aliquots of ethanol (with a brief centrifugation as above between each washing). The final volume of 100% ethanol per each tube is adjusted to 40 μl, and this particle/DNA suspension is kept on ice until being used for bombardment.

[0163] Immediately before applying the particle/DNA suspension, the tube is briefly dipped into a sonicator bath to disperse the particles, and then 5 μL of DNA prep is pipetted onto each flying disk and allowed to dry. The flying disk is then placed into the DuPont Biolistics PDS1000/HE. Using the DuPont Biolistic PDS1000/HE instrument for particle-mediated DNA delivery into soybean suspension clusters, the following settings are used. The membrane rupture pressure is 1100 psi. The chamber is evacuated to a vacuum of 27-28 inches of mercury. The tissue is placed approximately 3.5 inches from the retaining/stopping screen (3rd shelf from the bottom). Each plate is bombarded twice, and the tissue clusters are rearranged using a sterile spatula between shots.

[0164] Following bombardment, the tissue is re-suspended in liquid culture medium, each plate being divided between 2 flasks with fresh SB196 or SB172 media and cultured as described above. Four to seven days post-bombardment, the medium is replaced with fresh medium containing a selection agent. The selection media is refreshed weekly for 4 weeks and once again at 6 weeks. Weekly replacement after 4 weeks may be necessary if cell density and media turbidity is high.

[0165] Four to eight weeks post-bombardment, green, transformed tissue may be observed growing from untransformed, necrotic embryogenic clusters. Isolated, green tissue is removed and inoculated into 6-well microtiter plates with liquid medium to generate clonally-propagated, transformed embryogenic suspension cultures.

[0166] Each embryogenic cluster is placed into one well of a Costar 6-well plate with 5 mls fresh SB196 media with selection agent. Cultures are maintained for 2-6 weeks with fresh media changes every 2 weeks. When enough tissue is available, a portion of surviving transformed clones are subcultured to a second 6-well plate as a back-up to protect against contamination.

[0167] To promote in vitro maturation, transformed embryogenic clusters are removed from liquid SB196 and placed on solid agar media, SB 166, for 2 weeks. Tissue clumps of 2-4 mm size are plated at a tissue density of 10 to 15 clusters per plate. Plates are incubated in diffuse, low light (<10 μE) at 26+/−1° C. After two weeks, clusters are subcultured to SB 103 media for 3-4 weeks.

[0168] SB 166 is prepared as follows: (per liter), 1 pkg. MS salts (Gibco/BRL —Cat# 11117-017), 1 ml B5 vitamins 1000× stock, 60 g maltose, 750 mg MgCl2 hexahydrate, 5 g activated charcoal, pH 5.7, 2 g gelrite. SB 103 media is prepared as follows: (per liter), 1 pkg. MS salts (Gibco/BRL—Cat# 11117-017), 1 ml B5 vitamins 1000× stock, 60 g maltose, 750 mg MgCl2 hexahydrate, pH 5.7, 2 g gelrite. After 5-6 week maturation, individual embryos are desiccated by placing embryos into a 100×15 petri dish with a 1 cm2 portion of the SB103 media to create a chamber with enough humidity to promote partial desiccation, but not death.

[0169] Approximately 25 embryos are desiccated per plate. Plates are sealed with several layers of parafilm and again are placed in a lower light condition. The duration of the desiccation step is best determined empirically, and depends on size and quantity of embryos placed per plate. For example, small embryos or few embryos/plate require a shorter drying period, while large embryos or many embryos/plate require a longer drying period. It is best to check on the embryos after about 3 days, but proper desiccation will most likely take 5 to 7 days. Embryos will decrease in size during this process.

[0170] Desiccated embryos are planted in SB 71-1 or MSO medium where they are left to germinate under the same culture conditions described for the suspension cultures. When the plantlets have two fully-expanded trifoliate leaves, germinated and rooted embryos are transferred to sterile soil and watered with MS fertilizer. Plants are grown to maturity for seed collection and analysis. Healthy, fertile transgenic plants are grown in the greenhouse.

[0171] SB 71-1 is prepared as follows: 1 bottle Gamborg's B5 salts w/sucrose (Gibco/BRL—Cat# 21153-036), 10 g sucrose, 750 mg MgCl2 hexahydrate, pH 5.7, 2 g gelrite. MSO media is prepared as follows: 1 pkg Murashige and Skoog salts (Gibco 11117-066), 1 ml B5 vitamins 1000× stock, 30 g sucrose, pH 5.8, 2 g Gelrite.

### C. Transformation of Maize Using Agrobacterium

[0172] Agrobacterium-mediated transformation of maize is performed essentially as described by Zhao et al., in Meth. Mol. Biol. 318:315-323 (2006) (see also Zhao et al., Mol. Breed. 8:323-333 (2001) and U.S. Pat. No. 5,981,840 issued Nov. 9, 1999, incorporated herein by reference). The transformation process involves bacterium inoculation, co-cultivation, resting, selection and plant regeneration.

### 1. Immature Embryo Preparation:

[0173] Immature maize embryos are dissected from caryopses and placed in a 2 mL microtube containing 2 mL PHI-A medium.

### 2. Agrobacterium Infection and Co-Cultivation of Immature Embryos:

### 2.1 Infection Step:

[0174] PHI-A medium of (1) is removed with 1 mL micropipettor, and 1 mL of Agrobacterium suspension is added. The tube is gently inverted to mix. The mixture is incubated for 5 min at room temperature. 2.2 Co-culture Step:

[0175] The Agrobacterium suspension is removed from the infection step with a 1 mL micropipettor. Using a sterile spatula the embryos are scraped from the tube and transferred to a plate of PHI-B medium in a 100×15 mm Petri dish. The embryos are oriented with the embryonic axis down on the surface of the medium. Plates with the embryos are cultured at 20° C., in darkness, for three days. L-Cysteine can be used in the co-cultivation phase. With the standard binary vector, the co-cultivation medium supplied with 100-400 mg/L L-cysteine is critical for recovering stable transgenic events.

### 3. Selection of Putative Transgenic Events:

[0176] To each plate of PHI-D medium in a 100×15 mm Petri dish, 10 embryos are transferred, maintaining orientation and the dishes are sealed with parafilm. The plates are incubated in darkness at 28° C. Actively growing putative events, as pale yellow embryonic tissue, are expected to be visible in six to eight weeks. Embryos that produce no events may be brown and necrotic, and little friable tissue growth is evident. Putative transgenic embryonic tissue is subcultured to fresh PHI-D plates at two-three week intervals, depending on growth rate. The events are recorded.

### 4. Regeneration of T0 Plants:

[0177] Embryonic tissue propagated on PHI-D medium is subcultured to PHI-E medium (somatic embryo maturation medium), in 100×25 mm Petri dishes and incubated at 28° C., in darkness, until somatic embryos mature, for about ten to eighteen days. Individual, matured somatic embryos with well-defined scutellum and coleoptile are transferred to PHI-F embryo germination medium and incubated at 28° C. in the light (about 80 μE from cool white or equivalent fluorescent lamps). In seven to ten days, regenerated plants, about 10 cm tall, are potted in horticultural mix and hardened-off using standard horticultural methods.

### Media for Plant Transformation:

[0178] 1. PHI-A: 4 g/L CHU basal salts, 1.0 mL/L 1000× Eriksson's vitamin mix, 0.5 mg/L thiamin HCl, 1.5 mg/L 2,4-D, 0.69 g/L L-proline, 68.5 g/L sucrose, 36 g/L glucose, pH 5.2. Add 100 μM acetosyringone (filter-sterilized).
[0179] 2. PHI-B: PHI-A without glucose, increase 2,4-D to 2 mg/L, reduce sucrose to 30 g/L and supplemented with 0.85 mg/L silver nitrate (filter-sterilized), 3.0 g/L Gelrite®, 100 μM acetosyringone (filter-sterilized), pH 5.8.
[0180] 3. PHI-C: PHI-B without Gelrite® and acetosyringonee, reduce 2,4-D to 1.5 mg/L and supplemented with 8.0 g/L agar, 0.5 g/L 2-[N-morpholino]ethane-sulfonic acid (MES) buffer, 100 mg/L carbenicillin (filter-sterilized).
[0181] 4. PHI-D: PHI-C supplemented with 3 mg/L bialaphos (filter-sterilized).
[0182] 5. PHI-E: 4.3 g/L of Murashige and Skoog (MS) salts, (Gibco, BRL 11117-074), 0.5 mg/L nicotinic acid, 0.1 mg/L thiamine HCl, 0.5 mg/L pyridoxine HCl, 2.0 mg/L glycine, 0.1 g/L myo-inositol, 0.5 mg/L zeatin (Sigma, Cat. No. Z-0164), 1 mg/L indole acetic acid (IAA), 26.4 μg/L abscisic acid (ABA), 60 g/L sucrose, 3 mg/L bialaphos (filter-sterilized), 100 mg/L carbenicillin (filter-sterilized), 8 g/L agar, pH 5.6.
[0183] 6. PHI-F: PHI-E without zeatin, IAA, ABA; reduce sucrose to 40 g/L; replacing agar with 1.5 g/L Gelrite®; pH 5.6.

[0184] Plants can be regenerated from the transgenic callus by first transferring clusters of tissue to N6 medium supplemented with 0.2 mg per liter of 2,4-D. After two weeks the tissue can be transferred to regeneration medium (Fromm et al., Bio/Technology 8:833-839 (1990)).

[0185] Transgenic T0 plants can be regenerated and their phenotype determined. T1 seed can be collected.

[0186] Furthermore, a recombinant DNA construct containing a validated Arabidopsis gene can be introduced into a maize inbred line either by direct transformation or introgression from a separately transformed line.

[0187] Transgenic plants, either inbred or hybrid, can undergo more vigorous field-based experiments to study expression effects.

### Example 2

### Isolation of Small RNAs for MPSS or 454 Sequencing

[0188] RNA samples were extracted using Trizol reagent (Invitrogen), from the following tissues: drought-stressed maize leaves, well-watered maize leaves, unfertilized maize ovules, early stage maize kernels (2 days after pollination), mixed later stages maize kernels (7, 14 and 21 days after pollination). Total RNA was fractionated on 15% polyacrylamide TBE/urea gels, and a 21-nt RNA marker was also included in a separate lane. Following electrophoresis, the gels were stained with ethidium bromide, and the region of the gel corresponding to 20-22 nucleotides was excised. The small RNA fraction was eluted overnight, ethanol precipitated, and then ligated sequentially to 5′ and 3′ RNA adaptors, using T4 RNA ligase (5′ RNA adaptor GGUCUUAGUCGCAUCCUGUAGAUGGAUC and 3′ RNA adaptor pAUGCACACUGAUGCUGACACCUGCidT where p=phosphate; idT=inverted deoxythymidine; SEQ ID NOs:8428 and 8429, respectively). The products of each ligation were gel purified on 10% denaturing polyacrylamide gels, to remove unligated adaptors. RT-PCR was then carried out on the final ligation product, using primers complementary to the 5′ and 3′ adaptor sequences. Amplified cDNAs corresponding to small RNAs were sequenced using one of three methods: concatamerization followed by standard dideoxy sequencing (Elbashir et al., 2001 Genes & Dev. 15: 188-200), Massively Parallel Signature Sequencing (MPSS™) tag sequencing (Solexa) or 454™ sequencing (454 Life Sciences), or small RNA sequencing by SBS (Sequencing-By-Synthesis; Illumina™ Inc. San Diego, Calif.).

### Example 3

### Identification of Maize miRNA Sequences

[0189] Experimental data are analyzed by a program called “mirna”, referred to as “the program”. The program is written in the Perl programming language. It runs mainly from a CGI web interface, but also can be run from the command line.

[0190] For any particular combination of Zea mays genomic data and experimental results, experimental sequence data from MPSS or 454 sequencing is located in a maize genomic database; those which show a match between experimental sequence and genomic sequences are called “tags”. A mixture of proprietary and public genomic data are assembled into a set of contigs. Any non-contiguous genomic sequence or unassembled genomic sequence is searched separately. In addition, data derived from B73 and M017 cultivars are kept separate. All subsequent analysis is performed only on tags identified by matching sequences from the small RNA MPSS or 454 experiments to sequences located in the genomic databases.

[0191] A selectable series of screens is applied to these tags to determine computationally which tags are likely to represent miRNAs. Each screen can be selected or skipped by the user running the analysis. The screens include: removing tags found in repeat regions; removing tags that match known RNA; combining tags that have significant overlap in the genomic data; removing tags that match published known miRNAs; removing tags that appear near each other in clusters; removing tags that have a low PPM (parts-per-million, a measure of frequency) value in the experimental data; removing tags that do not have an easily identifiable base-pairing sequence nearby in the genome; and testing the region of the genome surrounding the tag for good RNA folding characteristics.

[0192] The RNA folding tests are performed by first employing a publicly available RNA folding algorithm (Vienna RNA Package) on a 500 bp region of the genome containing the tag. Regions that do not fold according to the default parameters (including a Gibbs free energy of −30ΔG; Hofacker et al. 1994 Monatsh.Chem. 125: 167-188) are removed from further consideration. A selectable series of tests are employed with adjustable parameters to identify those tags whose folds appear to be miRNA precursors. These parameters include several restrictions on the size and number of mismatched basepairs in the putative fold; the size and conformation of the hairpin region of the fold; matching characteristics of certain bases commonly found in miRNAs; and the folding characteristics of the region adjacent to the miRNA precursor.

[0193] The set of tags which pass these computational screens are then examined in several graphic displays that represent the fold, the putative miRNA, and the detailed results of the folding tests and other experimental results. This examination may result in a tag being rejected by an expert that had passed the computational screens. Additional computational screens that are suggested by these expert examinations may then be incorporated into the program.

[0194] The biological validity of the miRNA sequences is further tested by using WU-BLAST (Gish, Washington University at St. Louis; Altschul et al 1990 J Mol Biol 215:403-410) analysis to identify the putative genomic targets. Given the incomplete nature of the maize genome tags are not rejected on the basis of this target examination. However, computational identification of a target increases the likelihood that the miRNA sequence is biologically active. A combination of rice and maize genomic data are used in the identification of putative targets.

### Example 4

### Maize miRNA Sequences

[0195] The protocol outlined in Example 3 was employed on maize RNA isolated from the following maize tissues: drought-stressed maize leaves, well-watered maize leaves, unfertilized maize ovules, early stage maize kernels (2 days after pollination), mixed later stages maize kernels (7, 14 and 21 days after pollination).

[0196] Analysis yielded 2808 maize microRNA sequences (see Table 1 showing SEQ ID NOs:1-2652 found in U.S. Provisional Application No. 60/849,672, filed Oct. 5, 2006, and 156 additional microRNA sequences added herein SEQ ID NOs:7959-8114).

[0197] Known miRNA sequences were excluded from this list. Many of the known miRNA sequences were found to be abundantly represented in the sequenced libraries and were identified by the protocol outlined in this application. Known miRNA sequences were not limited to maize, even though the starting RNAs were all from maize. Therefore, it is expected that the 2808 miRNA sequences from maize disclosed in this application is a population enriched for maize-specific and lower abundance miRNA species. It should be noted that “lower abundance” is a relative term and the absolute amount of any given microRNA sequence in any given tissue or developmental state may be widely variable.

### Example 5

### Expression Analysis of Maize miRNAs

[0198] Expression analysis can be used to provide further evidence that a given small RNA sequence corresponds to a miRNA. The ability to detect a miRNA by Northern blotting and hybridization is a standard criterion used by researchers to validate candidate miRNAs (Ambros et al., 2003). Alternatively, RT-PCR protocols have been developed that allow detection of small RNAs that are of lower abundance (Shi and Chiang, 2005; Chen et al., 2005). We will use one or both of these procedures to validate selected candidate miRNAs from our list. In addition, most if not all of the miRNA candidates we are disclosing will be included as features on a microarray chip, which will allow hybridization to small RNA fractions of a variety of tissues and treatments. Expression profiling of miRNAs by microarray analysis is a rapidly evolving and robust technology that should allow further validation of candidate miRNAs, as well as provide information on tissue specificity and/or conditional expression of particular miRNAs.

[0199] Particular miRNA candidates may have clearly recognizable target transcripts based on bioinformatic analysis, which provides an opportunity for further validation of the miRNAs. Modified RACE-PCR on putative targets of selected miRNA candidates will be used to identify RISC cleavage products with a 5′ terminus located at the center of the putative target site of the miRNA (Llave et al., 2002). This result would strongly suggest that a given candidate miRNA enters into a RISC complex, and thus functions as would be expected for a bona fide miRNA.

[0200] Functional studies will be initiated on selected miRNAs with expression patterns and/or targets of agronomic interest, for example drought-induced or kernel-specific miRNAs. To determine the in planta function of selected miRNAs, the miRNA can be overexpressed by fusing a sequence (either cDNA or genomic) encompassing the hairpin precursor of the miRNA, plus a minimal amount of flanking sequence, to a constitutive promoter (e.g. the maize Ubiquitin promoter) and creating transgenic maize lines with this construct. Depending on the agronomic trait being studied, phenotyping can be carried out on independent T0 individuals overexpressing the miRNA. In addition, the effects of miRNA overexpression on the relevant target genes can be assessed by Northern blot and/or RT-PCR, to confirm that a predicted target is in fact a bona fide target. An independent demonstration that a given miRNA controls the expression of a given target gene is to mutate the target site present within the target gene (without changing amino acid sequence), and retransform the “miRNA-resistant” version of the target gene. This approach allows one to assess the phenotype conferred by loss of miRNA regulation, which in the majority of cases cannot be assessed by direct knockout of the miRNA (due to genetic redundancy and/or lack of an available knockout line).

### Example 6

### Validation of Small RNAs by Expression Profiling

[0201] Because the number of disclosed candidate miRNAs number in the thousands, validation must be performed using high-throughput procedures. Microarray technology is useful for this purpose. The flexibility and reliability of microarrays is well documented (Davison et al. (2006), Methods in Enzymology 411: 14-34; Axtell and Bartel (2005), Plant Cell 17: 1658-1673), as is their suitability for assaying the expression of many different tissues and conditions. The specific protocols for small RNA hybridization to microarrays have been available for the past couple of years. Microarrays are constructed to represent the candidate miRNAs, as well as known miRNAs already in the literature. Hybridization is carried out with labeled small RNA fractions purified from a variety of maize tissues, including different organs such as roots, leaves and flowers, and including environmental variables such as drought/pathogen stress and low nutrients. Statistical analysis of hybridization data allows one to identify candidate miRNAs displaying significant expression, and in this manner validate endogenous expression. This profiling approach also provides initial clues regarding the in vivo function of particular miRNAs, especially if their expression is tissue-specific or environmentally regulated. Further validation would involve Northern blot analysis and/or qRT-PCR on promising candidates (see Example 8).

[0202] Small RNA expression is analyzed by hybridization to a custom-designed plant miRNA expression array. Arrays are synthesized by Agilent technologies in the 2-pack 11,000 feature format. Known miRNA and candidate miRNA sequences from multiple species are represented by a series of specially designed reporter oligos. Reporters containing 0, 1 or 2 mismatches to the target sequence are designed in both the sense and antisense orientations. In addition, a duplexed reporter is added that contained two tandem copies of the antisense target sequence. Antisense duplexed and 0-mismatch reporters are used to detect miRNA expression. Antisense 1- and 2-mismatch reporters provide information on reporter specificity. Sense reporter data aids in differentiating miRNAs from small-interfering RNAs.

[0203] Total RNA is prepared using Trizol reagent (Invitrogen) and enriched for small RNAs (<200 nt) using glass fiber filters (miRvana small RNA isolation kit, Ambion). Small RNA samples are directly labeled with Cy-5 (Label IT miRNA labeling kit, Mirus Bio). Four micrograms of labeled RNA is hybridized to the custom arrays at 50° C. Hybridization, washing, scanning and feature extraction protocols follow the Agilent One-Color Microarray-Based Gene Expression Analysis protocols. To ensure reproducibility and reliability, samples are analyzed in triplicate. Data are analyzed using Rosetta Resolver, Spotfire DecisionSite, and customized spot-calling and error calculation programs.

[0204] Small RNAs are determined to be expressed if, for all three samples, the antisense duplex and O-mismatch reporters register intensities more than two standard deviations above background, but other reporters register signals at or below background intensity. These sequences are moved forward for additional validation by other techniques such as small RNA Northern blotting (Plant Cell. 2003;15(11): 2730-2741), in-gel miRNA detection (miR-tect-IT miRNA labeling and detection kit, USB Corporation), custom Taqman miRNA assays (Applied Biosystems), and poly-adenylation assisted RT-PCR.

### Example 7

### Validation of Small RNAs by Expression Profiling

### Tissue Source and RNA Extractions

[0205] Table 2 lists the genotypes, growth conditions and developmental stages of tissues harvested for expression profiling.

TABLE 2
Growth and harvest conditions for profiled samples

| Sample | | | | | Experimental |
|---|---|---|---|---|---|
| Name | Tissue | Genotype | Stage | Growth condition | Condition |
| B73 Leaf | Leaf | B73 | VT | pot grown; screen | Tissue survey |
| | | | | house: Newark, DE | |
| Ear | Immature ear | B73 | VT | pot grown; screen | Tissue survey |
| | | | | house: Newark, DE | |
| B73 | Aerial | B73 | V4 | germination paper in | Tissue survey |
| Seedling | seedling | | | water; growth chamber | |
| | | | | (28 C., 14 hours light, 10 | |
| | | | | hours dark) | |
| 3245 | Leaf | 3245 | V18 | field grown: Johnston, IA | Normal |
| Normal | | | | | nitrogen |
| Nitrogen | | | | | |
| 3245 Low | Leaf | 3245 | V18 | field grown: Johnston, IA | Low nitrogen |
| Nitrogen | | | | | |
| 33B50 | Leaf | 33B50 | V18 | field grown: Johnston, IA | Normal |
| Normal | | | | | nitrogen |
| Nitrogen | | | | | |
| B73 Low | Leaf | B73 | V18 | pot grown, greenhouse | Low Nitrogen |
| Nitrogen | | | | | |

[0206] Harvested tissues were immediately frozen in liquid nitrogen and stored at −80 C. Tissues were homogenized to powder form while kept frozen. Total RNA was isolated from 2-5 grams of homogenized tissue by organic extraction using the manufacturer's protocol for Trizol™ Reagent (Invitrogen; Carlsbad, Calif.) or the E.Z.N.A. DNA/RNA Isolation System™ (Omega Bio-Tek; Doraville, Ga.). A fraction enriched for RNA molecules under 200 nucleotides in length was isolated from 100 micrograms total RNA using the mirVana™ miRNA Isolation Kit (Ambion; Austin Tex.), protocol IV.A: Isolation of small RNAs from total RNA samples. The total RNA and small RNA samples were analyzed on an RNA 6000 Nano Chip and Small RNA Chip (2100 Bioanalyzer, Agilent Technologies) respectively to determine the quality and concentration of the sample.

### Array Design

[0207] Custom gene expression microarrays were manufactured by Agilent Technologies in the 4×44 k format. Each sixty nucleotide probe encoded two tandem bait sequences separated by a three nucleotide spacer and followed by 15 nucleotides of Agilent's generic spacer sequence. Guanine residues preceded each bait sequence. The overall probe design followed the format: 5′-G[BAIT]₂₁ₙₜ ATAG[BAIT]₂₁ₙₜ GCGTTCCGTATGTGG-3′.

[0208] Three probes were designed for each small RNA assayed: perfectly sequence matched probes (0MM) used bait sequences antisense to the query sequence; single mismatch probes (1 MM) used antisense query sequences with a substitution at the tenth position from the 5′ end of the sense query sequence as bait; double mismatch probes (2MM) used antisense query sequences with substitutions at the seventh and fifteenth positions from the 5′ end of the sense query sequence as bait. Substitutions were made by replacing A with T, T with A, G with C, and C with G.

### Small RNA Labeling

[0209] Prior to labeling, an aliquot of a spike-in control cocktail was added to 5 micrograms of each small RNA sample. Direct labeling of the RNA was achieved by incubating four micrograms of each sample with 4 microliters of the LabelIT Cy3 Reagent according to the LabelIT miRNA Labeling Kit protocol (Mirus Bio Corporation; Madison Wis.). The samples were subsequently quantitated with a spectrophotometer to measure concentration and Cy3 incorporation rates.

### Array Hybridization

[0210] Each sample was hybridized to a custom Agilent oligonucleotide array overnight at 50 C in a rotating hybridization oven. The microarray slides were hybridized and washed according to Agilent Technologies One-Color Microarray-Based Gene Expression Analysis Protocol and immediately scanned with Agilent's DNA Microarray Scanner at two laser settings (100% and 10% PMT).

### Data Analysis

[0211] The images were visually inspected for image artifacts and feature intensities were extracted, filtered, and normalized with Agilent's Feature Extraction Software (version 9.5.3.1). Further quality control and downstream analysis was performed using data analysis tools in Rosetta's Resolver Database (NBIC Rosetta Resolver System).

[0212] Samples were assayed as biological duplicates or triplicates. Feature intensity data was combined and normalized among replicates and within experiments using a least squares method with weighted regression of error. A brief description of the statistical methods for analysis of the miRNA microarray data, were previously reported (Luck, (2001) Proceedings of SPIE 4266:153-157). The analysis is based on the vector space representations of fluorescence intensities for microarrays and miRNAs. The first stage of the analysis involves the normalization of microarray intensities to adjust for variations in instrumental response between replicates. The normalization parameters are estimated by applying weighted regression to characterize the covariance between replicates. The normalized intensities for the replicates are averaged to obtain an intensity for each miRNA probe for a given tissue. Intensities for replicates are correlated, consequently the miRNA vectors are distributed about a mean line with dimensionality equal to the number of replicates. The noise in the intensity measurements is estimated by analyzing the squared deviations of the replicate vectors from the mean line. A variance function is obtained by weighted quadratic regression of the squared deviations versus mean intensity. An empirical confidence interval can then be associated with each value of averaged intensity. The confidence interval characterizes the overall noise including biological and instrumental contributions. The confidence intervals are used to estimate the significance level of observed deviations from the mean and identify outlier vectors among the replicates. Similarly the significance level for differences between means is used to identify those miRNAs that show significant changes in hybridization due to mismatched probes. The t distribution was used to estimate p-values for the difference statistics with the degrees of freedom equal to the number of replicates.

[0213] The reproducibility of each normalized signal was determined by ANOVA or t-test calculations among the biological replicates of each sample. Sequences with replicate P-values above 0.05 were considered to be sufficiently reproducible.

[0214] A t-test was performed comparing the normalized signal for each probe to the background signal in that sample. A query sequence with a 0MM-background P-value less than 0.05 was considered to be expressed significantly above background.

[0215] Two calculations were used to ensure the specificity of the 0MM signal for each query sequence. Again using the t-test, the 0MM normalized signal was compared pair-wise with the normalized signal for each of the query sequence's mismatch probes. Because P-values only indicate the significance of the difference between signals, but not which signal is greater, each 0MM signal was also required to be larger than both its cognate 1 MM and 2MM signals. Any query sequence whose 0MM signal was larger than both of its cognate mismatch signals and whose 0MM-1 MM and 0MM-2MM P-values were both less than 0.05 was considered to be show appropriate signal specificity. These criteria are summarized in Table 3.

TABLE 3
Criteria used to determine the reliable detection of query
sequences.

| Value | Criteria |
|---|---|
| 0 MM replicate P-value | >0.05 |
| 0 MM-background P-value | <0.05 |
| 0 MM-1 MM P-value | <0.05 |
| 0 MM-2 MM P-value | <0.05 |
| 0 MM-1 MM | >0 |
| 0 MM-2 MM | >0 |

[0216] Detection criteria were applied to each sample independently. Query sequences meeting all the criteria outlined above were considered to have been reliably detected by the expression array and were marked as “passed,” “enriched,” or “highly enriched” in Table 4. A query sequence was designated as “enriched” in a given sample if it met all reliable detection criteria and its 0MM signal intensity in that sample was between 5-fold and 10-fold above the 0MM intensity for any other sample in the same experiment. “Highly enriched” sequences met all reliable detection criteria and displayed 0MM signal intensity at least 10-fold above the 0MM intensity of any other sample in the same experiment. In the two experiments that contained only a single sample (“33B50 Normal Nitrogen” and “B73 Low Nitrogen”) query sequences were analyzed only for meeting reliable detection criteria—no calls as to enrichment were made. 0MM intensity scores in arbitrary and reliable detection assessments are listed by sample for each query sequence in Table 4.

[0217] Expression profile results for the first 2652 maize microRNAs from Table 1 are summarized in Table 4.

### Detection of Public Domain Zea mays miRNAs

[0218] Public domain Zea mays miRNAs were included among the query sequences for use as detection standards. Due to sequence redundancy among miRNA family members, the 116 maize miRNAs published at the time of array design were fully represented by 50 unique mature miRNA sequences (Griffiths-Jones, et al. Nuc Acids Res (2006) 34:D140-D144. Release 9.0; Zhang, et al. FEBS Lett. (2006) 580:3753-62; Sunkar, et al. The Plant Cell (2005) 17:1397-1411; Johnson, et al. Nuc Acids Res (2007) 35:D829-D833). Using the reliable detection criteria outline in Table 3, 88% of public domain miRNA sequences were detected in at least one sample.

[0219] Of the six public domain miRNA sequences that failed to meet reliable detection criteria in any sample, only miR437 and miR444 failed to surpass background noise. As miR437 expression has not been assayed in maize and miR444 expression in maize is known to be weak compared to its expression in rice, low signal strength for these sequences could be expected (Sunkar, et al. The Plant Cell (2005) 17:1397-1411). That only 4% of public domain miRNAs sequences failed to surpass background signal indicated an excellent signal to noise ratio within these datasets. MiR168a/b, miR390 and miR395a/b/c surpassed background but failed to show significant difference between 0MM and 1 MM signals. Although the 0MM signal was above background and distinct from its cognate mismatches, 2MM signal for miR171 g was consistently higher than its 0MM signal. For the four miRNA sequences lacking signal resolution, it was impossible to conclude whether the query sequence was absent and the 0MM signal indicated cross-hybridization or whether the query sequence was present in addition to a second sequence that specifically hybridized to the mismatch probe.

[0220] Many public domain miRNAs have detectable basal expression in nearly all tissues. (Johnson, et al. Nuc Acids Res (2007) 35:D829-D833). Consistent with this, 46% of public domain miRNAs were reliably detected in all samples tested. Within the tissue comparison experiment, 78% or more of the public domain miRNAs are present in any sample. Near-ubiquitous basal expression also accounts for so few public domain miRNAs being scored as “enriched” or “highly enriched” in a single tissue or experimental condition. The reliable detection of public domain miRNAs is summarized in Table 5.

TABLE 5
Summary of the reliable detection of public domain miRNAs.

| | Pass all | Simple | | Highly |
|---|---|---|---|---|
| Sample | criteria | Pass | Enriched | Enriched |
| MAXIMUM | 100% (50) | | | |
| POSSIBLE | | | | |
| B73 Leaf | 84% (42) | 84% (42) | 0% (0) | 0% (0) |
| B73 Ear | 78% (39) | 76% (38) | 2% (1) | 0% (0) |
| B73 Seedling | 82% (41) | 82% (41) | 0% (0) | 0% (0) |
| All tissues in survey | 74% (37) | | | |
| One or more tissues | 88% (44) | | | |
| 3245 Normal | 70% (35) | 70% (35) | 0% (0) | 0% (0) |
| Nitrogen | | | | |
| 3245 Low Nitrogen | 62% (31) | 62% (31) | 0% (0) | 0% (0) |
| Both samples | 62% (31) | | | |
| 33B50 Normal | 56% (28) | | | |
| Nitrogen | | | | |
| B73 Low Nitrogen | 78% (39) | | | |
| All samples | 46% (23) | | | |
| One or more | 88% (44) | | | |
| samples | | | | |

### Detection of Candidate miRNA Sequences

[0221] The reliable detection criteria described in Table 3 were also applied to data from probes representing the 2652 candidate miRNAs disclosed in this application (see Table 6). Only 136 or 5.1% of these candidates were reliably detected in all seven samples. Because they were cloned or sequenced from small RNA libraries, the most abundant and widely expressed miRNAs would have been among the earliest to be detected and published. Accordingly, it is reasonable that the proportion of candidate miRNAs ubiquitously detected was much smaller than that for public domain miRNAs. In absolute terms, the full validation of 136 miRNAs would approximately double the known cadre of maize miRNAs.

[0222] Since the most abundant miRNAs are expected to have been discovered and published in early RNA library searches, candidates showing extremely robust 0MM intensity scores across all or most samples should be treated with caution. Because the direct labeling technique conjugates a fluorescent molecule to each guanine residue, longer sequences are generally brighter than short sequences. The size fractionation kit used in sample preparation enriched for small RNAs from 0-200 nucleotides. Accordingly, candidates with 0MM intensity scores above 20,000 in most samples may be artifacts caused by RNA species much larger than 21 nucleotides in length.

[0223] Forty-one candidate sequences, or 1.5%, were reliably detected as enriched or highly enriched in particular samples. Strong tissue- or condition-specific detection patterns suggest these candidates may be especially useful in targeted gene silencing.

[0224] B73 was one of the maize strains used in the MPSS deep sequencing experiments that yielded the 2652 candidate miRNAs. The tissue survey samples used in the array analysis were also from B73 plants, as was an unpaired low nitrogen sample. Public domain and candidate miRNAs met reliable detection standards at higher rates in B73 samples than in other genotypes. Because public domain miRNAs showed differing pass rates between B73 and other genotypes, some of the discrepancy may be attributed to differences in growth conditions or sample handling. Nonetheless, candidate miRNAs showed a much greater disparity in reliable detection between B73 and other genotypes, raising the possibility that miRNAs can be differentially expressed in distinct genetic backgrounds.

TABLE 6
Summary of the reliable detection of candidate miRNAs.

| | Pass all | Simple | | |
|---|---|---|---|---|
| Sample | criteria | Pass | Enriched | Highly Enriched |
| MAXIMUM | 100.0% (2652) | | | |
| POSSIBLE | | | | |
| B73 Leaf | 31.7% (841) | 31.1% (824) | 0.1% (3) | 0.5% (14) |
| B73 Ear | 62.0% (1645) | 61.3% (1626) | 0.8% (20) | 0.2% (6) |
| B73 Seedling | 42.2% (1120) | 42.2% (1118) | 0.1% (2) | 0.0% (1) |
| All tissues in survey | 27.6% (731) | | | |
| One or more tissues | 64.9% (1722) | | | |
| 3245 Normal | 12.9% (343) | 12.9% (342) | 0.0% (0) | 0.0% (1) |
| Nitrogen | | | | |
| 3245 Low Nitrogen | 9.4% (250) | 9.4% (250) | 0.0% (0) | 0.0% (0) |
| Both samples | 9.2% (243) | | | |
| 33B50 Normal | 8.1% (216) | | | |
| Nitrogen | | | | |
| B73 Low Nitrogen | 20.4% (540) | | | |
| All samples above | 5.1% (136) | | | |
| One or more | 65.6% (1739) | | | |
| samples | | | | |

### Example 8

### Validation of Small RNAs by Poly-Adenylation Assisted RT-PCR

[0225] The miRNA expression array and analysis procedures described in Example 7 can be used to evaluate candidate miRNA detectability and expression levels in additional samples, including but not limited to: additional profiling of developmentally staged organs or tissues; tissues from mutant strains defective in miRNA and small RNA biogenesis; tissues from plants exposed to biotic stress such as pathogens, pests, or weed pressure; tissues from plants exposed to abiotic stresses such as drought, heat, or cold; and tissues from plants subjected to nutrient stress such as low nitrogen.

[0226] Candidates can be prioritized for individual characterization based on the number of samples in which they were reliably detected, the utility potential of putative targets, and temporal, spatial and conditional expression patterns. Well known characterization methods include, but are not limited to, quantitative RT-PCR, Northern blotting, in situ hybridization, reporter silencing assays, and modified 5′ RACE on putative targets.

[0227] As an example, small RNAs are analyzed using a modified version of the Shi & Chiang protocol that allows for the amplification of RNA fragments that do not have native poly(A) tails (Biotechniques. 2005; 39(4):519-25). DNA is removed from total RNA samples prepared with Trizol reagent (Invitrogen) by digestion with recombinant DNasel (Ambion). Following ethanol precipitation of the RNA, the material is poly-adenylated using E. coli Poly(A) polymerase (Poly(A) Tailing Kit, Ambion).

[0228] First-strand DNA synthesis is accomplished with SuperScriptIII reverse transcriptase and supplied poly(T) primers (GeneRacer Kit, Invitrogen). Subsequent amplification by end-point PCR uses low annealing temperatures (56° C.) and short extension times (30 seconds). The GeneRacer 3′ Primer (GeneRacer Kit, Invitrogen) is used as reverse primer and a sense, DNA version of the small RNA of interest is used as a forward primer. The presence of the diagnostic ˜81 mer PCR product is assessed by visualizing PCR products with ethidium bromide on 10% acrylamide TBE gels (Criterion gels, BioRad).

### Example 9

### Selective Regulation of Transgenes with MicroRNAs

[0229] Because each candidate miRNA has the potential to recognize and negatively regulate a complementary sequence (i.e. “target site”), it is believed that target sites for these candidate miRNAs will serve as useful cis-acting regulatory sequences in transgenic constructs (Parizotto et al. (2004) Genes Dev 18: 2237-2242). This is especially true when the miRNA displays a precise tissue-specific or conditional pattern of expression. For example, to express a particular gene of interest in the shoot but not in the root, the target site of a root-specific miRNA is fused to the coding sequence of said gene of interest. In this manner, even if the gene of interest is driven by a constitutive promoter, the transcript should only accumulate in the shoot and not in the root, because the endogenous root-specific miRNA will recognize the attached target site and silence the gene's expression in the root.

[0230] To test this idea, miRNAs displaying tissue-specific expression are identified (see Example 7). Ideally, biologically relevant targets can be found bioinformatically and validated by the RACE cleavage assay; however, a sequence that is perfectly complementary to the miRNA should also suffice. The sequence designated as target site is fused to the 5′ or 3′ end of a suitable reporter gene that is driven by a constitutive promoter, and transgenic plants are generated. A pattern of expression that is the opposite of the tissue-specific miRNA pattern is taken as evidence that the target site is working as a cis regulatory element. This type of cis regulation allows further refinement of transgene expression patterns, such that “leaky” promoters (e.g. with small amounts of gene expression in undesirable tissues or conditions) are fine tuned and true tissue-specificity is achieved.

[0231] One example of a miRNA that has a stage-specific pattern of expression is miR172. In young Arabidopsis seedlings, miR172 is undetectable, whereas in more mature seedlings it is at higher levels, and this higher expression persists after the transition to flowering (Aukerman and Sakai (2003) Plant Cell 15:2730-41). Addition of the miR172 target site to a heterologous gene in a transgenic construct should therefore allow the transgene to be turned on in early seedling development, and then downregulated later on. To test this concept, the target sequence for miR172 is fused to the 3′ end of the coding sequence for coral reef yellow fluorescent protein (ZS-yellow, Clonetech). As a negative control, a mutated version of the miR172 target site is separately fused to ZS-yellow, and both gene cassettes are separately placed under the control of the constitutive 35S promoter in a standard binary vector. These constructs are transformed into Arabidopsis (ecotype Col-0), and also into the rdr6 mutant if the levels of transgene silencing (independent of miRNA regulation) are too high. The expected result is that levels of ZS-yellow will be high in young transgenic seedlings containing the ZS-yellow/wild-type target site, and much lower as the plants mature. On the other hand, transgenic plants containing the ZS-yellow/mutated target site should not display this stage-specific downregulation.

[0232] To extend this analysis to maize, a target site for one of the maize miRNAs in this application's sequence listing, (SEQ ID NO:116; 5′-TTAGATGACCATCAGCAAAC-3′) is useful. This particular miRNA is expressed at high levels in maize endosperm, and at much lower levels in other tissues. The target gene is EB158863, and the target site has two mismatches with the miRNA at the 3′ end of the miRNA. The target site is fused to the 3′ end of ZS-yellow, and this construct is placed under the control of the maize ubiquitin promoter. The expression construct is inserted into a suitable vector for maize transformation. A negative control construct containing a mutated version of the target site is also be made. Both constructs are transformed into maize embryogenic callus, and transgenic plants are selected. The expected result is that the levels of ZS-yellow will be high in most parts of the plants that contain the ZS-yellow/wild-type target site, but much lower in the endosperm. On the other hand, transgenic plants containing the ZS-yellow/mutated target site should not display this endosperm-preferred downregulation.

[0233] A reciprocal result is also possible in these types of experiments. The enriched/highly enriched calls shown in Example 7 were based on condition specificity or enhancement. Therefore the summaries were weighted for detection versus no detection. It is just as likely that particular microRNAs are depleted in a specific tissue rather than being enhanced in a specific tissue. This would allow target genes to be generally repressed and then expressed in a limited fashion in those tissues where the particular microRNA is under-expressed.

[0234] In both experiments described above, a pattern of expression that is the opposite of the tissue-specific miRNA pattern will be taken as evidence that the target site under study is working as a cis regulatory element. Utilizing these novel cis elements in combination with a wide variety of promoter elements allows for expression of transgenes in very specific patterns or stages during plant growth and development. For example, this type of cis regulation by miRNA targets would allow further refinement of transgene expression patterns, such that “leaky” promoters (e.g. with small amounts of gene expression in undesirable tissues or conditions) could be fine tuned and true tissue-specificity could be achieved. It is also envisioned that multiple miRNA targets could be incorporated in concert on a single expressed transgene. Multiple miRNA targets with different patterns of regulation and control could impart novel modes of regulation on transgene expression.

### Example 10

### Transgene Abundance May Affect Regulation by MicroRNAs

[0235] To test the potential for combinatorial control of transgenes by multiple miRNAs, the following experiment was performed. The ZS-yellow coding region was separately fused to either a target sequence for AtmiR827 at the 5′ end, or to a target sequence for AtmiR397 at the 3′ end (“single site constructs”). In a third construct, both target sequences were fused to ZS-yellow coding sequence, in the same positions as the single site constructs, thus creating a “double site construct.” Previous data showed that AtmiR827 was specifically expressed in hydathodes, based upon analyses of AtmiR827 promoter-GUS histochemical assays. Therefore, a single site transgene construct containing the target site for AtmiR827 would be under the control of the endogenous miRNA, and might be expected to give rise to reduced expression of the transgene in hydathodes, when compared to a “no site” control construct. Likewise, microarray analysis had suggested that AtmiR397 was preferentially expressed in the root, and therefore a construct containing the target site for AtmiR397 might be expected to give rise to reduced expression of the transgene in the root, when compared to a “no site” control. The double site construct might be expected to behave as the sum of both single site constructs, giving rise to reduced expression in both the hydathode and root.

[0236] All three modified ZS-yellow sequences were separately placed under the control of the constitutive 35S promoter, and an unmodified ZS-yellow sequence was also separately fused to 35S as the “no site” control, in the binary vector pBC (Promega; Madison, Wis.). Both single site constructs, the double site construct, and the “no site” control construct were transformed into Arabidopsis using “floral dip” transformation (Clough and Bent (1998) Plant J 16:735-43) and T1 seeds were identified that expressed YFP from the ZS-yellow transgene. The T1 seeds were germinated on agar plates, and monitored for YFP expression starting at 5 days after germination. There were no observed differences in the expression pattern between the four constructs. More specifically, there was no observed reduction of YFP expression in the hydathodes in plants containing ZS-yellow fused to the target site for AtmiR827, nor was there a reduction of YFP expression in the roots of plants containing ZS-yellow fused to the target site for AtmiR397, when compared to ZS-yellow alone. Plants containing both sites fused to ZS-yellow likewise showed no effect relative to ZS-yellow alone. It is possible that the levels of endogenous AtmiR827 and AtmiR397 are too low relative to the levels of target-linked ZS-yellow to have achieved the desired downregulation in the relevant tissues. Both miRNAs are in general not very abundant, compared to commonly studied miRNAs like miR171 or miR156; whereas the target gene sequences in this experiment were driven by a strong viral promoter (35S). It should be noted that the only group that has reported transgene downregulation mediated by an endogenous miRNA (Parizotto et al. (2004) Genes Dev 18: 2237-2242) utilized miR171, a highly abundant miRNA, to downregulate a 35S-driven transgene containing the cognate target site.

### Example 11

### Selective Regulation of Transgenes with MicroRNAs of Comparable Abundance

[0237] YFP transcripts incorporating AtmiR827 and Atmir397 target sites may not have exhibited altered expression due to the extremely low abundance of those miRNAs in planta, especially when compared to the high levels of YFP mRNA likely produced by the 35S promoter. Therefore, target sites from more abundant miRNAs might circumvent this potential problem. To this end, the ZS-yellow coding region can be separately fused to either a target sequence for AtmiR171 at the 5′ end, or to a target sequence for AtmiR156 at the 3′ end (“single site constructs”). In a third construct, both target sequences will be fused to ZS-yellow coding sequence, in the same positions as the single site constructs, thus creating a “double site” construct. Both AtmiR171 and AtmiR156 are relatively abundant microRNAs, and are expressed in a variety of tissues. In the gynoecium, AtmiR171 is expressed in the carpel valves but absent from the replum, style and stigma; this pattern is reciprocal to that seen for a reporter construct (“sensor construct”) containing the AtmiR171 target site (Parizotto et al. (2004) Genes Dev 18: 2237-2242). In contrast, AtmiR156 expression in the gynoecium is limited to the style (Rebecca Schwab, 2006, thesis from University of Tubingen), and thus the single site construct containing an AtmiR156 target site fused to ZS-yellow should have YFP expression in all parts of the gynoecium except the style. The double site construct with ZS-yellow would be expected to give rise to YFP expression only in the areas where both miRNAs are absent, i.e. the replum and stigma. One would expect the double site construct to behave as the sum of both single site constructs, with regards to YFP expression in the gynoecium.

### Example 12

### Trans-Acting miRNA Silencing

[0238] One can envision using tissue- or stage-specific miRNAs to silence a gene of interest only in a particular tissue or development stage of the organism, utilizing an artificial transacting siRNA (ta-siRNA) construct. The objective in this case is to generate artificial ta-siRNAs in a tissue- or stage-specific manner, by using a miRNA target corresponding to a tissue- or stage-specific miRNA as the trigger sequence (“trigger” refers to the target sequence that initiates production of the downstream ta-siRNAs). For example, if it were desired to silence a gene in the seeds of plants, one would choose as a trigger sequence the target sequence of a miRNA present only in the seeds. Such constructs are generated as follows:

[0239] A chimeric polynucleotide is constructed in which the target site for a tissue- or stage-specific miRNA is used as a trigger sequence and is operably linked to the 5′ end of a silencer sequence. The silencer sequence comprises a synthetic DNA fragment containing 5 repeated copies of a 21 nucleotide segment complementary to the Arabidopsis fatty acid desaturase 2 (FAD2) gene with the sequence [5′-TTGCTTTCTTCAGATCTCCCA-3′; SEQ ID NO:7958]. The trigger sequence complementary to the miRNA is followed by 11 nucleotides such that the miRNA cleavage site is separated by 21 nucleotides from the first of the 21 nucleotide FAD2 segments. Sequences flanking the trigger and silencer are derived from the TAS1c locus (Allen et al. (2005) Cell 121:207-21). The 35S promoter and leader sequence (Odell (1985) Nature 313: 810-812) are attached to the 5′ end of the chimeric construct and the phaseolin transcriptional terminator (Barr et al. (2004) Molecular Breeding 13: 345-356) to the 3′ end. The entire chimeric polynucleotide is inserted into the standard binary vector pBE851 (Aukerman and Sakai (2003) Plant Cell 15:2730-41) and transformed into Arabidopsis using the method of Clough and Bent (1998) Plant Journal 16:735-43. As a control, the exact same construct is made but with 3 nucleotides of the miRNA target site mutated. Transgenic plants containing the experimental construct are monitored for silencing of the FAD2 gene using fatty acid analysis (Browse et al. (1986) Analytical Biochemistry 152: 141-145) and compared to control plants. Silencing may be scored as a detectable reduction in transcript level and/or a reduction in the gene products produced by those transcripts.

[0240] It is believed that any of the targets of microRNAs of the present invention could be useful as the tissue- or stage-specific trigger sequences. In addition, concatemers of miRNA sequences (such as those found in SEQ ID NO:7957 or SEQ ID NO:8427) are also useful as silencer sequences which would down-regulate their endogenous targets and/or the gene products of those targets in a pattern directed by the trigger sequence. Using different combinations of miRNA target sequences one could conceivably alter the expression patterns of multiple genes with a single construct.

The application's sequence listing, which the Patent Office published only in electronic form, follows.

SEQUENCE LISTING (8429 sequences)

SEQ ID NO: 1 - DNA, 21 bp, Zea mays
tagggctagtttgggagtcca

SEQ ID NO: 2 - DNA, 21 bp, Zea mays
gcggcttgctgcggctgcaat

SEQ ID NO: 3 - DNA, 21 bp, Zea mays
aaggccttgttcgtttgtatt

SEQ ID NO: 4 - DNA, 21 bp, Zea mays
gcgtgcaaggagccaagcatg

SEQ ID NO: 5 - DNA, 21 bp, Zea mays
gtgtcaaaaacaggtggtgga

SEQ ID NO: 6 - DNA, 21 bp, Zea mays
gacgacgacgacgatgaccca

SEQ ID NO: 7 - DNA, 21 bp, Zea mays
tgggctcggccttcttatata

SEQ ID NO: 8 - DNA, 21 bp, Zea mays
cggccggccggccggccgtca

SEQ ID NO: 9 - DNA, 21 bp, Zea mays
agatcagaaagagaccagagg

SEQ ID NO: 10 - DNA, 21 bp, Zea mays
ggcagtctccttggctagccc

SEQ ID NO: 11 - DNA, 21 bp, Zea mays
agaacagagcggctccgttcc

SEQ ID NO: 12 - DNA, 21 bp, Zea mays
atcggatgcaccagatcgctt

SEQ ID NO: 13 - DNA, 21 bp, Zea mays
tgtgccagaagcggcgatggg

SEQ ID NO: 14 - DNA, 21 bp, Zea mays
attcaaacccatccaatccca

SEQ ID NO: 15 - DNA, 21 bp, Zea mays
gagccagctcgttagctcgaa

SEQ ID NO: 16 - DNA, 21 bp, Zea mays
gtccgacacggccactgacag

SEQ ID NO: 17 - DNA, 21 bp, Zea mays
acgactaaccttaggcaaaat

SEQ ID NO: 18 - DNA, 21 bp, Zea mays
aggttgacgagattggccagg

SEQ ID NO: 19 - DNA, 21 bp, Zea mays
gagagctaaccgaacaagccc

SEQ ID NO: 20 - DNA, 21 bp, Zea mays
ggcaaagtgtggcaagttaac

SEQ ID NO: 21 - DNA, 21 bp, Zea mays
agggctaatttggtgattagg

SEQ ID NO: 22 - DNA, 21 bp, Zea mays
cggcacaaacgaacaaagtct

SEQ ID NO: 23 - DNA, 21 bp, Zea mays
caccgactgcaacccagctct

SEQ ID NO: 24 - DNA, 21 bp, Zea mays
taagtgccggtgggctcggcc

SEQ ID NO: 25 - DNA, 21 bp, Zea mays
cacaaacgaacaagacctcag

SEQ ID NO: 26 - DNA, 21 bp, Zea mays
cgccgcgccgggccgccgcca

SEQ ID NO: 27 - DNA, 21 bp, Zea mays
gggcctgtttggtttgtggct

SEQ ID NO: 28 - DNA, 21 bp, Zea mays
ggcaaagtgtggcaacttagg

SEQ ID NO: 29 - DNA, 21 bp, Zea mays
cgtcgtcggcgcggacgagag

SEQ ID NO: 30 - DNA, 21 bp, Zea mays
taggccctgtttggaagcaac

SEQ ID NO: 31 - DNA, 21 bp, Zea mays
cactcggcaaagagccaaaac

SEQ ID NO: 32 - DNA, 21 bp, Zea mays
ctttgccgagtgccagcgaca

SEQ ID NO: 33 - DNA, 21 bp, Zea mays
cagagctcccttcaatccaaa

SEQ ID NO: 34 - DNA, 21 bp, Zea mays
tacacttgtgacgtcaacata

SEQ ID NO: 35 - DNA, 21 bp, Zea mays
tgcacgtgccctgcttctcca

SEQ ID NO: 36 - DNA, 21 bp, Zea mays
aacaacatgatgtagttcaat

SEQ ID NO: 37 - DNA, 21 bp, Zea mays
cctattccctgtcattgagta

SEQ ID NO: 38 - DNA, 21 bp, Zea mays
ctgatttggtgaccagggatc

SEQ ID NO: 39 - DNA, 21 bp, Zea mays
ctggaccctatgctcgggact

SEQ ID NO: 40 - DNA, 21 bp, Zea mays
ggtgcaagcatgcaatcaaat

SEQ ID NO: 41 - DNA, 21 bp, Zea mays
aggagcccgacgtctgcatct

SEQ ID NO: 42 - DNA, 21 bp, Zea mays
tcgtcgtcaaccgccgccgcc

SEQ ID NO: 43 - DNA, 21 bp, Zea mays
gattgagagctaaccgaacaa

SEQ ID NO: 44 - DNA, 21 bp, Zea mays
gggcctgtttggtttgatggt

SEQ ID NO: 45 - DNA, 21 bp, Zea mays
gggcttcttcttgcgcaggcc

SEQ ID NO: 46 - DNA, 21 bp, Zea mays
cagtggcggacgcaggacgaa

SEQ ID NO: 47 - DNA, 21 bp, Zea mays
ggctcgggctctcagcgacgg

SEQ ID NO: 48 - DNA, 21 bp, Zea mays
cgaccgcctcctccggcacgg

SEQ ID NO: 49 - DNA, 21 bp, Zea mays
cggtgaggtcgttggcgctgt

SEQ ID NO: 50 - DNA, 21 bp, Zea mays
aggcagaaccaggggaggaag

SEQ ID NO: 51 - DNA, 21 bp, Zea mays
cacgcggcagtgcccaccccc

SEQ ID NO: 52 - DNA, 21 bp, Zea mays
ctctttgccgagtgccagcga

SEQ ID NO: 53 - DNA, 21 bp, Zea mays
acacaaacgaacaaggcctaa

SEQ ID NO: 54 - DNA, 21 bp, Zea mays
cttgcacgcttgcacataatg

SEQ ID NO: 55 - DNA, 21 bp, Zea mays
tgtcatggcttgtggctgaat

SEQ ID NO: 56 - DNA, 21 bp, Zea mays
gttgcaacgcacggacatata

SEQ ID NO: 57 - DNA, 21 bp, Zea mays
gttcgtttccgtcggattaca

SEQ ID NO: 58 - DNA, 21 bp, Zea mays
gttcgtttccgtcggattgga

SEQ ID NO: 59 - DNA, 21 bp, Zea mays
gggggtgtttggtttctagtg

SEQ ID NO: 60 - DNA, 21 bp, Zea mays
gagcagccaggctcccaaaaa

SEQ ID NO: 61 - DNA, 21 bp, Zea mays
gttggcgagcgaagcggagac

SEQ ID NO: 62 - DNA, 21 bp, Zea mays
aggagcagatgcagacgaggg

SEQ ID NO: 63 - DNA, 21 bp, Zea mays
ccacaaaccaaacaggccctt

SEQ ID NO: 64 - DNA, 21 bp, Zea mays
tgctcggcggcggcgtagcgc

SEQ ID NO: 65 - DNA, 21 bp, Zea mays
gtggcaagttaggcatcaaat

SEQ ID NO: 66 - DNA, 21 bp, Zea mays
tccagtcggttggcggcgatg

SEQ ID NO: 67 - DNA, 21 bp, Zea mays
ggtgcaagcatgcaatcaagc

SEQ ID NO: 68 - DNA, 21 bp, Zea mays
gccgactgccgtggagagcgc

SEQ ID NO: 69 - DNA, 21 bp, Zea mays
gtagcaacgcacgggcacatg

SEQ ID NO: 70 - DNA, 21 bp, Zea mays
caccagcggcgacgggaacct

SEQ ID NO: 71 - DNA, 21 bp, Zea mays
cagatcatgctggcagcttca

SEQ ID NO: 72 - DNA, 21 bp, Zea mays
tagtccctagaaaccaaacac

SEQ ID NO: 73 - DNA, 21 bp, Zea mays
tagctgatagttgcgtgagtt

SEQ ID NO: 74 - DNA, 21 bp, Zea mays
actggaccgcctgtgatgtgt

SEQ ID NO: 75 - DNA, 21 bp, Zea mays
aaagacactcggcaaagaaac

SEQ ID NO: 76 - DNA, 21 bp, Zea mays
aaaacactcggcaaagagctc

SEQ ID NO: 77 - DNA, 21 bp, Zea mays
ctttgccgagtgttttttctc

SEQ ID NO: 78 - DNA, 21 bp, Zea mays
tcggttacccgtgcgttgcga

SEQ ID NO: 79 - DNA, 21 bp, Zea mays
ttctcggccttttggctaaga

SEQ ID NO: 80 - DNA, 21 bp, Zea mays
cggctgacaaccgacgggaat

SEQ ID NO: 81 - DNA, 21 bp, Zea mays
tggatcagatggtttgcttgt

SEQ ID NO: 82 - DNA, 21 bp, Zea mays
cttgcaggtagaagccatcct

SEQ ID NO: 83 - DNA, 21 bp, Zea mays
agtgactgctgtattgctgtc

SEQ ID NO: 84 - DNA, 21 bp, Zea mays
cactcgacagtccaacccggt

SEQ ID NO: 85 - DNA, 21 bp, Zea mays
gggggtgtttggtttctaggg

SEQ ID NO: 86 - DNA, 21 bp, Zea mays
agtccctagaaaccaaacacc

SEQ ID NO: 87 - DNA, 21 bp, Zea mays
ctggccgccgaaaatgactgt

SEQ ID NO: 88 - DNA, 21 bp, Zea mays
cctccggttttgtggcttcca

SEQ ID NO: 89 - DNA, 21 bp, Zea mays
cagacgagcagcgagcggttt

SEQ ID NO: 90 - DNA, 21 bp, Zea mays
cgattccaggtgcaatccgac

SEQ ID NO: 91 - DNA, 21 bp, Zea mays
ttagccacgaaccaaacagcc

SEQ ID NO: 92 - DNA, 21 bp, Zea mays
caggctgtttgcagccccaca

SEQ ID NO: 93 - DNA, 21 bp, Zea mays
cgctggagcctggaggatcgt

SEQ ID NO: 94 - DNA, 21 bp, Zea mays
aacccagggcttccattacct

SEQ ID NO: 95 - DNA, 21 bp, Zea mays
gggtcacatcaagcgtttaac

SEQ ID NO: 96 - DNA, 21 bp, Zea mays
ggctcattccggtacaaccga

SEQ ID NO: 97 - DNA, 21 bp, Zea mays
cactatgtgtacaaacctaaa

SEQ ID NO: 98 - DNA, 21 bp, Zea mays
gatattggcacggctcaatca

SEQ ID NO: 99 - DNA, 21 bp, Zea mays
ttattataaccaaacacatcc

SEQ ID NO: 100 - DNA, 21 bp, Zea mays
gttaggcaaagtgtggcaagt

SEQ ID NO: 101 - DNA, 21 bp, Zea mays
gtcaaacgcttgatgtgaccc

SEQ ID NO: 102 - DNA, 21 bp, Zea mays
agatctagatcggatgcacca

SEQ ID NO: 103 - DNA, 21 bp, Zea mays
ggtcccgatctgcaccaagcg

SEQ ID NO: 104 - DNA, 21 bp, Zea mays
cactatgtgtacaaacctaag

SEQ ID NO: 105 - DNA, 21 bp, Zea mays
agtttctctctaaggtatgcc

SEQ ID NO: 106 - DNA, 21 bp, Zea mays
aatgacagaacgggatgagat

SEQ ID NO: 107 - DNA, 21 bp, Zea mays
tttttctacagtattttgtct

SEQ ID NO: 108 - DNA, 21 bp, Zea mays
agtggattaagatgtattgag

SEQ ID NO: 109 - DNA, 21 bp, Zea mays
tatctctatatcgtcggatct

SEQ ID NO: 110 - DNA, 21 bp, Zea mays
catgctggcagcttcactcat

SEQ ID NO: 111 - DNA, 21 bp, Zea mays
tagatcatgctggcagcttca

SEQ ID NO: 112 - DNA, 21 bp, Zea mays
aatattagaggcagcgcatac

SEQ ID NO: 113 - DNA, 21 bp, Zea mays
ctggcagctctgcttctgtcg

SEQ ID NO: 114 - DNA, 21 bp, Zea mays
ttaccgagtctgttagattag

SEQ ID NO: 115 - DNA, 21 bp, Zea mays
cagttcaagaaagcctgtgga

SEQ ID NO: 116 - DNA, 21 bp, Zea mays
ttagatgaccatcagcaaaca

SEQ ID NO: 117 - DNA, 21 bp, Zea mays
tggcttaaaagtgtggcgcgg

SEQ ID NO: 118 - DNA, 21 bp, Zea mays
agaatgttattgttaagcttc

SEQ ID NO: 119 - DNA, 21 bp, Zea mays
ggattggatcgaagggagctc

SEQ ID NO: 120 - DNA, 21 bp, Zea mays
catgctggcagcttcaccaac

SEQ ID NO: 121 - DNA, 21 bp, Zea mays
ggttcacaaaatgtaacgtaa

SEQ ID NO: 122 - DNA, 21 bp, Zea mays
gtggatttgtgtggccgtcat

SEQ ID NO: 123 - DNA, 21 bp, Zea mays
tagttaagccgtgtgataaat

SEQ ID NO: 124 - DNA, 21 bp, Zea mays
gatcaatgcgatccctttgga

SEQ ID NO: 125 - DNA, 21 bp, Zea mays
ccggcaagtcatccttggctg

SEQ ID NO: 126 - DNA, 21 bp, Zea mays
agagttgatgcagatctgatc

SEQ ID NO: 127 - DNA, 21 bp, Zea mays
ttagatcatgatccaaccgta

SEQ ID NO: 128 - DNA, 21 bp, Zea mays
ctctcatatggaaccaggcta

SEQ ID NO: 129 - DNA, 21 bp, Zea mays
atcttatgactggcaacggct

SEQ ID NO: 130 - DNA, 21 bp, Zea mays
atgcagcatcatcaagattct

SEQ ID NO: 131 - DNA, 21 bp, Zea mays
gttttttgacctatggattag

SEQ ID NO: 132 - DNA, 21 bp, Zea mays
gctaaaacgccttaacaacct

SEQ ID NO: 133 - DNA, 21 bp, Zea mays
cagttcaagaaagctgtggaa

SEQ ID NO: 134 - DNA, 21 bp, Zea mays
tggcatacaaggaatgagtat

SEQ ID NO: 135 - DNA, 21 bp, Zea mays
gttggatgtggagggtgtgat

SEQ ID NO: 136 - DNA, 21 bp, Zea mays
acggtcctctaaatttagatg

SEQ ID NO: 137 - DNA, 21 bp, Zea mays
acggtcctctaaatttagaga

SEQ ID NO: 138 - DNA, 21 bp, Zea mays
tcggataaaaccacgcctacc

SEQ ID NO: 139 - DNA, 21 bp, Zea mays
attgcacgtttgcaccaaaat

SEQ ID NO: 140 - DNA, 21 bp, Zea mays
agggctgcttggatggccact

SEQ ID NO: 141 - DNA, 21 bp, Zea mays
ataccccaaattcagggtgtt

SEQ ID NO: 142 - DNA, 21 bp, Zea mays
ggtagcttcgttaagctggcg

SEQ ID NO: 143 - DNA, 21 bp, Zea mays
gtgatggttaggtcgcagccc

SEQ ID NO: 144 - DNA, 21 bp, Zea mays
gagttcaggaaccaagtgaca

SEQ ID NO: 145 - DNA, 21 bp, Zea mays
ctgccgccacgtcccggctcg

SEQ ID NO: 146 - DNA, 21 bp, Zea mays
ttatgcttcgttgtgtacgaa

SEQ ID NO: 147 - DNA, 21 bp, Zea mays
gagcatggcatcataagcatt

SEQ ID NO: 148 - DNA, 21 bp, Zea mays
caggcttcgttgtctttattc

SEQ ID NO: 149 - DNA, 21 bp, Zea mays
acagcctatggcgccgagcta

SEQ ID NO: 150 - DNA, 21 bp, Zea mays
tagtccctagaaaccaaacat

SEQ ID NO: 151 - DNA, 21 bp, Zea mays
aaacgcttgatgtgacccggg

SEQ ID NO: 152 - DNA, 21 bp, Zea mays
gtgacccgggctaaactttag

SEQ ID NO: 153 - DNA, 21 bp, Zea mays
gtggactaaagtttagcccgg

SEQ ID NO: 154 - DNA, 21 bp, Zea mays
cacgagtcgagcgagctcacg

SEQ ID NO: 155 - DNA, 21 bp, Zea mays
gctagatagcggaccaacaga

SEQ ID NO: 156 - DNA, 21 bp, Zea mays
agttagccacgaaccaaacag

SEQ ID NO: 157 - DNA, 21 bp, Zea mays
tcacaaaaatgaggatagact

SEQ ID NO: 158 - DNA, 21 bp, Zea mays
atcggctatccatatccgtca

SEQ ID NO: 159 - DNA, 21 bp, Zea mays
ccgagctcggcgccatagatc

SEQ ID NO: 160 - DNA, 21 bp, Zea mays
ccatagatcttggcgccgagc

SEQ ID NO: 161 - DNA, 21 bp, Zea mays
tcgaggacgagctgcttatcc

SEQ ID NO: 162 - DNA, 21 bp, Zea mays
tagggctagtttgggagctca

SEQ ID NO: 163 - DNA, 21 bp, Zea mays
gaagcactcggcaaagctaga

SEQ ID NO: 164 - DNA, 21 bp, Zea mays
aagggtgcgtttggttgcaat

SEQ ID NO: 165 - DNA, 21 bp, Zea mays
cgactgctgcggtgcgccagg

SEQ ID NO: 166 - DNA, 21 bp, Zea mays
tggatcagatggtttgcttgc

SEQ ID NO: 167 - DNA, 21 bp, Zea mays
gagcttagcttggcccatgcg

SEQ ID NO: 168 - DNA, 21 bp, Zea mays
tgcgtttggttgcaatgacag

SEQ ID NO: 169 - DNA, 21 bp, Zea mays
agctgccgactcatccattca

SEQ ID NO: 170 - DNA, 21 bp, Zea mays
atcagaaagaggccagaggcc

SEQ ID NO: 171 - DNA, 21 bp, Zea mays
gcccgtctagctcagtcggta

SEQ ID NO: 172 - DNA, 21 bp, Zea mays
tgctgtttctctgcaggacaa

SEQ ID NO: 173 - DNA, 21 bp, Zea mays
gtgcggcggctcccagatccg

SEQ ID NO: 174 - DNA, 21 bp, Zea mays
ggcactatcaagcaggcacgg

SEQ ID NO: 175 - DNA, 21 bp, Zea mays
gggctcgagtccagccatacg

SEQ ID NO: 176 - DNA, 21 bp, Zea mays
attgcaaccatcagtatcatg

SEQ ID NO: 177 - DNA, 21 bp, Zea mays
ctttgccgagtgttttttgtc

SEQ ID NO: 178 - DNA, 21 bp, Zea mays
aaacgaacaaggcctaaggct

SEQ ID NO: 179 - DNA, 21 bp, Zea mays
cacaaacgaacaagaccttaa

SEQ ID NO: 180 - DNA, 21 bp, Zea mays
ttggcacggctcaatcagaga

SEQ ID NO: 181 - DNA, 21 bp, Zea mays
ttagctggaacgattccgtgt

SEQ ID NO: 182 - DNA, 21 bp, Zea mays
gaaagtcaaacgcttgatgtg

SEQ ID NO: 183 - DNA, 21 bp, Zea mays
aaaactttgttcccaaacagt

SEQ ID NO: 184 - DNA, 21 bp, Zea mays
aaggccttgttcgtttgggtc

SEQ ID NO: 185 - DNA, 21 bp, Zea mays
acggcgaaccagcaagcgaac

SEQ ID NO: 186 - DNA, 21 bp, Zea mays
aagcggaccctaagacaaaaa

SEQ ID NO: 187 - DNA, 21 bp, Zea mays
caaacgcttgatgtgacccgg

SEQ ID NO: 188 - DNA, 21 bp, Zea mays
aaggccttgttcgtttgtgcc

SEQ ID NO: 189 - DNA, 21 bp, Zea mays
ataactaaccttaggcagaaa

SEQ ID NO: 190 - DNA, 21 bp, Zea mays
cggccaaccaaccaatcacgt

SEQ ID NO: 191 - DNA, 21 bp, Zea mays
ttggcacagacctcattgcta

SEQ ID NO: 192 - DNA, 21 bp, Zea mays
ccagggcgccgccgtcggcga

SEQ ID NO: 193 - DNA, 21 bp, Zea mays
gcgtctgaacggatggcttcg

SEQ ID NO: 194 - DNA, 21 bp, Zea mays
gtgggccgtgcttttgtgggc

SEQ ID NO: 195 - DNA, 21 bp, Zea mays
taggatgtgtttggttgcggg

SEQ ID NO: 196 - DNA, 21 bp, Zea mays
ccatagcactcggcaaaagaa

SEQ ID NO: 197 - DNA, 21 bp, Zea mays
ataactaaccttaggcaaaaa

SEQ ID NO: 198 - DNA, 21 bp, Zea mays
gagactttgccgagtgtgccc

SEQ ID NO: 199 - DNA, 21 bp, Zea mays
gacacaaacgaacaaggcatc

SEQ ID NO: 200 - DNA, 21 bp, Zea mays
aaaacactcggcaaagaagct

SEQ ID NO: 201 - DNA, 21 bp, Zea mays
gcttctttgccgagtgttttc

SEQ ID NO: 202 - DNA, 21 bp, Zea mays
aaaagcactcggcaaagaagc

SEQ ID NO: 203 - DNA, 21 bp, Zea mays
gtagagatggcaatggggacc

SEQ ID NO: 204 - DNA, 21 bp, Zea mays
agttagccacgaaccaaacat

SEQ ID NO: 205 - DNA, 21 bp, Zea mays
gaaacgaacaaggcctaaacg

SEQ ID NO: 206 - DNA, 21 bp, Zea mays
aggccttgttcgtttctgccg

SEQ ID NO: 207 - DNA, 21 bp, Zea mays
gacgtgaacgagactccggat

SEQ ID NO: 208 - DNA, 21 bp, Zea mays
atgtccccgttgcaacgcatg

SEQ ID NO: 209 - DNA, 21 bp, Zea mays
ctgatttggtgacccgggatt

SEQ ID NO: 210 - DNA, 21 bp, Zea mays
agcccggcagcaaaccaggat

SEQ ID NO: 211 - DNA, 21 bp, Zea mays
gtggcaagttagacagtgaac

SEQ ID NO: 212 - DNA, 21 bp, Zea mays
ccccccccccccccccccaat

SEQ ID NO: 213 - DNA, 21 bp, Zea mays
tagggctagtttgggagtcat

SEQ ID NO: 214 - DNA, 21 bp, Zea mays
cgtgcgttgctacggagtcaa

SEQ ID NO: 215 - DNA, 21 bp, Zea mays
tggtgcaagcgtgcaaccaaa

SEQ ID NO: 216 - DNA, 21 bp, Zea mays
tagtccctagaaaccaaacaa

SEQ ID NO: 217 - DNA, 21 bp, Zea mays
gacacaaacgaacaaggccta

SEQ ID NO: 218 - DNA, 21 bp, Zea mays
aggccttgttcgtttgtgtcg

SEQ ID NO: 219 - DNA, 21 bp, Zea mays
cagactttcaacgtgtgttga

SEQ ID NO: 220 - DNA, 21 bp, Zea mays
cccgccttgcaccaagtgaat

SEQ ID NO: 221 - DNA, 21 bp, Zea mays
cgatctgcaccaagcgagccc

SEQ ID NO: 222 - DNA, 21 bp, Zea mays
ggcaaagtgtggcaagttaga

SEQ ID NO: 223 - DNA, 21 bp, Zea mays
caagatctatggcgccgagct

SEQ ID NO: 224 - DNA, 21 bp, Zea mays
tgaggccttgttcgtttgtgc

SEQ ID NO: 225 - DNA, 21 bp, Zea mays
agcctttgccgagtgtcaggc

SEQ ID NO: 226 - DNA, 21 bp, Zea mays
ggcgctgatgaccgtcgctga

SEQ ID NO: 227 - DNA, 21 bp, Zea mays
aagggtgcgtttggttgtaat

SEQ ID NO: 228 - DNA, 21 bp, Zea mays
aaactttggttgagaccaatc

SEQ ID NO: 229 - DNA, 21 bp, Zea mays
tagggctagtttgggagcaaa

SEQ ID NO: 230 - DNA, 21 bp, Zea mays
acagcctaaggttaggcatgc

SEQ ID NO: 231 - DNA, 21 bp, Zea mays
gtttggtttgtggctaattat

SEQ ID NO: 232 - DNA, 21 bp, Zea mays
agccaaggatgagctgcctgt

SEQ ID NO: 233 - DNA, 21 bp, Zea mays
aggcagtctccttggctagtc

SEQ ID NO: 234 - DNA, 21 bp, Zea mays
cttgtgacttgcgacgatgcg

SEQ ID NO: 235 - DNA, 21 bp, Zea mays
cctactttttcatctcccgca

SEQ ID NO: 236 - DNA, 21 bp, Zea mays
agccacgaaccaaacaagccc

SEQ ID NO: 237 - DNA, 21 bp, Zea mays
gctgatttggtgaccagagaa

SEQ ID NO: 238 - DNA, 21 bp, Zea mays
gaagctcctttcagctgatgc

SEQ ID NO: 239 - DNA, 21 bp, Zea mays
taggatgtgtttggttgcctg

SEQ ID NO: 240 - DNA, 21 bp, Zea mays
ggattgaccctacctgcaggt

SEQ ID NO: 241 - DNA, 21 bp, Zea mays
gtgatgagggtacggctccag

SEQ ID NO: 242 - DNA, 21 bp, Zea mays
acaagtaaggccgcaacggta

SEQ ID NO: 243 - DNA, 21 bp, Zea mays
gagtccaaataccggagagga

SEQ ID NO: 244 - DNA, 21 bp, Zea mays
aggtgagtgaccgtgcgtcat

SEQ ID NO: 245 - DNA, 21 bp, Zea mays
cacgccaaagcacaggtctaa

SEQ ID NO: 246 - DNA, 21 bp, Zea mays
ctgatttggtgacccgggatc

SEQ ID NO: 247 - DNA, 21 bp, Zea mays
tcgtctaacctcaatctcatt

SEQ ID NO: 248 - DNA, 21 bp, Zea mays
ggcaaagtgtggcaagttagg

SEQ ID NO: 249 - DNA, 21 bp, Zea mays
ccagactagtcggttgtccgt

SEQ ID NO: 250 - DNA, 21 bp, Zea mays
gagaagacgacggagtcgctc

SEQ ID NO: 251 - DNA, 21 bp, Zea mays
tcgcgagctaaacgagccgag

SEQ ID NO: 252 - DNA, 21 bp, Zea mays
gtgccacagacgcggtctagg

SEQ ID NO: 253 - DNA, 21 bp, Zea mays
actctaaatttagaggatgag

SEQ ID NO: 254 - DNA, 21 bp, Zea mays
gaagcctggtccgagatcttg

SEQ ID NO: 255 - DNA, 21 bp, Zea mays
tagggctagtttgggagttag

SEQ ID NO: 256 - DNA, 21 bp, Zea mays
gagatgctagggctatccacg

SEQ ID NO: 257 - DNA, 21 bp, Zea mays
aatttcggatacggatacggg

SEQ ID NO: 258 - DNA, 21 bp, Zea mays
gaatggacggctgagatcgca

SEQ ID NO: 259 - DNA, 21 bp, Zea mays
aggccttgttcgtttgtgccg

SEQ ID NO: 260 - DNA, 21 bp, Zea mays
acttgctagaggccaactgga

SEQ ID NO: 261 - DNA, 21 bp, Zea mays
gctgtttggactgctgctaga

SEQ ID NO: 262 - DNA, 21 bp, Zea mays
gtgacaagttaggcagggaac

SEQ ID NO: 263 - DNA, 21 bp, Zea mays
aggccttgttcgtttctgtcg

SEQ ID NO: 264 - DNA, 21 bp, Zea mays
tgcgtttggttgcaatgatag

SEQ ID NO: 265 - DNA, 21 bp, Zea mays
acggctatcgggtcccattga

SEQ ID NO: 266 - DNA, 21 bp, Zea mays
aagtcaaacgcttgatgtgac

SEQ ID NO: 267 - DNA, 21 bp, Zea mays
gctgtttttttttcttttaga

SEQ ID NO: 268 - DNA, 21 bp, Zea mays
tcgcgttctttgccgagtgtc

SEQ ID NO: 269 - DNA, 21 bp, Zea mays
ctcagttgccacagtttgcca

SEQ ID NO: 270 - DNA, 21 bp, Zea mays
tcactctcttctgtcagccac

SEQ ID NO: 271 - DNA, 21 bp, Zea mays
taagcttatgtccgacggtgg

SEQ ID NO: 272 - DNA, 21 bp, Zea mays
taagcttatgtccgactgctt

SEQ ID NO: 273 - DNA, 21 bp, Zea mays
gctgatttggtgaccagggat

SEQ ID NO: 274 - DNA, 21 bp, Zea mays
ataggctatgacgccgagtta

SEQ ID NO: 275 - DNA, 21 bp, Zea mays
aagacaaagggcctgtttggt

SEQ ID NO: 276 - DNA, 21 bp, Zea mays
cttgcaggtagaagccatctt

SEQ ID NO: 277 - DNA, 21 bp, Zea mays
tagggctagtttgggaggtcc

SEQ ID NO: 278 - DNA, 21 bp, Zea mays
gtgcgagattcgctggcgtgg

SEQ ID NO: 279 - DNA, 21 bp, Zea mays
ctcagcagaggaggcagcacg

SEQ ID NO: 280 - DNA, 21 bp, Zea mays
cacgcacgcagggtcaccggc

SEQ ID NO: 281 - DNA, 21 bp, Zea mays
aaggccttgttcgtttgtgtt

SEQ ID NO: 282 - DNA, 21 bp, Zea mays
taggctatctccagcaatcta

SEQ ID NO: 283 - DNA, 21 bp, Zea mays
ccagactgtttgcagcctctc

SEQ ID NO: 284 - DNA, 21 bp, Zea mays
gtgagaggctgcaaacagtct

SEQ ID NO: 285 - DNA, 21 bp, Zea mays
gaggggctgcaaacagcctgc

SEQ ID NO: 286 - DNA, 21 bp, Zea mays
aatcgtcgactagggcgacta

SEQ ID NO: 287 - DNA, 21 bp, Zea mays
tagggctagtttgggagcaag

SEQ ID NO: 288 - DNA, 21 bp, Zea mays
aggaccgaccaggcgcctaat

SEQ ID NO: 289 - DNA, 21 bp, Zea mays
cactcggcaaagaacactcgg

SEQ ID NO: 290 - DNA, 21 bp, Zea mays
atgacgaccgttgaaactggt

SEQ ID NO: 291 - DNA, 21 bp, Zea mays
ggcaaagtgtggcaagttaag

SEQ ID NO: 292 - DNA, 21 bp, Zea mays
agttagccacgaaccaaacaa

SEQ ID NO: 293 - DNA, 21 bp, Zea mays
ccgacgcaaacgaacaaagcc

SEQ ID NO: 294 - DNA, 21 bp, Zea mays
cccgtgcgttgcaacgggaat

SEQ ID NO: 295 - DNA, 21 bp, Zea mays
actgttggactgcgggtttcc

SEQ ID NO: 296 - DNA, 21 bp, Zea mays
gagtccaaataccggagggga

SEQ ID NO: 297 - DNA, 21 bp, Zea mays
ctgtgagtgcgacgacgacgg

SEQ ID NO: 298 - DNA, 21 bp, Zea mays
gtgagccgtcgcaacgcacag

SEQ ID NO: 299 - DNA, 21 bp, Zea mays
cgttgcgacggctcacaacaa

SEQ ID NO: 300 - DNA, 21 bp, Zea mays
gcttctttgccgagtgttttt

SEQ ID NO: 301 - DNA, 21 bp, Zea mays
aggcagtctccttggctagcc

SEQ ID NO: 302 - DNA, 21 bp, Zea mays
tgaggccttgttcgtttatgt

SEQ ID NO: 303 - DNA, 21 bp, Zea mays
actccactttgccgagtgcaa

SEQ ID NO: 304 - DNA, 21 bp, Zea mays
gcttctttgccgagtgtcagg

SEQ ID NO: 305 - DNA, 21 bp, Zea mays
taggcgagtcgtgactgcgtc

SEQ ID NO: 306 - DNA, 21 bp, Zea mays
ctgggccagacccattacaga

SEQ ID NO: 307 - DNA, 21 bp, Zea mays
ccaaacaatgtagtggacggt

SEQ ID NO: 308 - DNA, 21 bp, Zea mays
gttaggaacgtgggtacccac

SEQ ID NO: 309 - DNA, 21 bp, Zea mays
tagtccctagaaaccaaatac

SEQ ID NO: 310 - DNA, 21 bp, Zea mays
gtttggtttgtggctaattac

SEQ ID NO: 311 - DNA, 21 bp, Zea mays
atgtgcccgtgcgttgcgacg

SEQ ID NO: 312 - DNA, 21 bp, Zea mays
aggccttgttcgtttgtaccg

SEQ ID NO: 313 - DNA, 21 bp, Zea mays
tagggctagtttgggagcaca

SEQ ID NO: 314 - DNA, 21 bp, Zea mays
ccttttctcggcgtcatagtc

SEQ ID NO: 315 - DNA, 21 bp, Zea mays
cactcggcaaagaaggcacac

SEQ ID NO: 316 - DNA, 21 bp, Zea mays
tagggctagtttgggagccat

SEQ ID NO: 317 - DNA, 21 bp, Zea mays
agcaatccggttaggaatcgt

SEQ ID NO: 318 - DNA, 21 bp, Zea mays
gcctctgctaagccgtcagac

SEQ ID NO: 319 - DNA, 21 bp, Zea mays
actagcaggctgacgggctat

SEQ ID NO: 320 - DNA, 21 bp, Zea mays
gagacactggatatagggttg

SEQ ID NO: 321 - DNA, 21 bp, Zea mays
aaaggcactcggcaaaggctc

SEQ ID NO: 322 - DNA, 21 bp, Zea mays
cacaaacgaacaagaccttag

SEQ ID NO: 323 - DNA, 21 bp, Zea mays
gtttggtttgtggctaactgt

SEQ ID NO: 324 - DNA, 21 bp, Zea mays
cactcgacaaagaaggcacac

SEQ ID NO: 325 - DNA, 21 bp, Zea mays
gagagccacaaaaccggaggg

SEQ ID NO: 326 - DNA, 21 bp, Zea mays
taagtgccggtgggctcagcc

SEQ ID NO: 327 - DNA, 21 bp, Zea mays
aggccttgttcgtttgcgtcg

SEQ ID NO: 328 - DNA, 21 bp, Zea mays
cccaaatagggccttagatca

SEQ ID NO: 329 - DNA, 21 bp, Zea mays
aaggccttgttcgtttgtgtc

SEQ ID NO: 330 - DNA, 21 bp, Zea mays
gacacaaacgaacaaggcctt

SEQ ID NO: 331 - DNA, 21 bp, Zea mays
cgtgggtacccacgttcttac

SEQ ID NO: 332 - DNA, 21 bp, Zea mays
aaccgaacaaggcctaaggtg

SEQ ID NO: 333 - DNA, 21 bp, Zea mays
gcgtgctggagcaacggcgat

SEQ ID NO: 334 - DNA, 21 bp, Zea mays
tgtgccagaccggcccatatg

SEQ ID NO: 335 - DNA, 21 bp, Zea mays
agagctgatttggtgattggg

SEQ ID NO: 336 - DNA, 21 bp, Zea mays
cccaagaatcaggtgaagacg

SEQ ID NO: 337 - DNA, 21 bp, Zea mays
agccacgaaccaaacaacccg

SEQ ID NO: 338 - DNA, 21 bp, Zea mays
aaaccaggccgtttgcagccc

SEQ ID NO: 339 - DNA, 21 bp, Zea mays
accttaggcaaagtgtgacac

SEQ ID NO: 340 - DNA, 21 bp, Zea mays
cccgtgcgttgcaacggggac

SEQ ID NO: 341 - DNA, 21 bp, Zea mays
tttctcacggtccatctgtga

SEQ ID NO: 342 - DNA, 21 bp, Zea mays
agttagccacgaaccaaatag

SEQ ID NO: 343 - DNA, 21 bp, Zea mays
gtttggtttgtggctaactat

SEQ ID NO: 344 - DNA, 21 bp, Zea mays
tcgacgacactgtcaacggcg

SEQ ID NO: 345 - DNA, 21 bp, Zea mays
agggcttgttcggttgcgaga

SEQ ID NO: 346 - DNA, 21 bp, Zea mays
gacacaaacgaacaaggtctt

SEQ ID NO: 347 - DNA, 21 bp, Zea mays
aaggccttgttcgtttgtgct

SEQ ID NO: 348 - DNA, 21 bp, Zea mays
tgctcgtgcgttgcaacggaa

SEQ ID NO: 349 - DNA, 21 bp, Zea mays
tagtccctagaaaccaaaccc

SEQ ID NO: 350 - DNA, 21 bp, Zea mays
agagctgatttggtgatcaga

SEQ ID NO: 351 - DNA, 21 bp, Zea mays
tagggctagtttgggagcctc

SEQ ID NO: 352 - DNA, 21 bp, Zea mays
agggtaggatacaggatgaca

SEQ ID NO: 353 - DNA, 21 bp, Zea mays
aaaacactcggcaaagagctt

SEQ ID NO: 354 - DNA, 21 bp, Zea mays
atcggatgcaccagatcgttt

SEQ ID NO: 355 - DNA, 21 bp, Zea mays
caaccatatcggtcggctttg

SEQ ID NO: 356 - DNA, 21 bp, Zea mays
gacgacaaccagcgagcccta

SEQ ID NO: 357 - DNA, 21 bp, Zea mays
tagtccctagaaaccaagcac

SEQ ID NO: 358 - DNA, 21 bp, Zea mays
cgaccgaccgaccgacctgct

SEQ ID NO: 359 - DNA, 21 bp, Zea mays
aaccgaccggtttgaccgccg

SEQ ID NO: 360 - DNA, 21 bp, Zea mays
caacttgaccatgggagccag

SEQ ID NO: 361 - DNA, 21 bp, Zea mays
cggcttgctgcggctgcaatc

SEQ ID NO: 362 - DNA, 21 bp, Zea mays
agaacagagcggctccgttct

SEQ ID NO: 363 - DNA, 21 bp, Zea mays
cggcacaaacgaacaaagcct

SEQ ID NO: 364 - DNA, 21 bp, Zea mays
cggcaagttgttcttggctac

SEQ ID NO: 365 - DNA, 21 bp, Zea mays
ccaattcgtcgaagccggact

SEQ ID NO: 366 - DNA, 21 bp, Zea mays
accgtttggtcatctatattt

SEQ ID NO: 367 - DNA, 21 bp, Zea mays
ttgttcggttagctctcaact

SEQ ID NO: 368 - DNA, 21 bp, Zea mays
caagcccgaaaaggcccatat

SEQ ID NO: 369 - DNA, 21 bp, Zea mays
ggcctattagctcagttggtt

SEQ ID NO: 370 - DNA, 21 bp, Zea mays
gacccggactaaactttagca

SEQ ID NO: 371 - DNA, 21 bp, Zea mays
gcttctttgccgagtgttgtg

SEQ ID NO: 372 - DNA, 21 bp, Zea mays
agttgctttggcagtgtgcgg

SEQ ID NO: 373 - DNA, 21 bp, Zea mays
gcttctttgccgagtgtctaa

SEQ ID NO: 374 - DNA, 21 bp, Zea mays
ttctttgccgagtgccaaggc

SEQ ID NO: 375 - DNA, 21 bp, Zea mays
caagcgctcgacaaattgtct

SEQ ID NO: 376 - DNA, 21 bp, Zea mays
agttagccacgaaccaaacgt

SEQ ID NO: 377 - DNA, 21 bp, Zea mays
aaaaagcactcgacaaagcgc

SEQ ID NO: 378 - DNA, 21 bp, Zea mays
atcttagtctctaaattgcta

SEQ ID NO: 379 - DNA, 21 bp, Zea mays
cgtgcgagcaagccgtaggat

SEQ ID NO: 380 - DNA, 21 bp, Zea mays
cagacactcggcaaagtttat

SEQ ID NO: 381 - DNA, 21 bp, Zea mays
aagagccggattccggtagtg

SEQ ID NO: 382 - DNA, 21 bp, Zea mays
atcccacgggcctggctgagg

SEQ ID NO: 383 - DNA, 21 bp, Zea mays
acatgattaaggtcttgcgga

SEQ ID NO: 384 - DNA, 21 bp, Zea mays
gaagggcacagctgagcaaaa

SEQ ID NO: 385 - DNA, 21 bp, Zea mays
gaataagggctaaaccgacgg

SEQ ID NO: 386 - DNA, 21 bp, Zea mays
cggtttagcccttattcccgt

SEQ ID NO: 387 - DNA, 21 bp, Zea mays
tgcgctaagcacgtttgattc

SEQ ID NO: 388 - DNA, 21 bp, Zea mays
tgggaatcagacctgatctgc

SEQ ID NO: 389 - DNA, 21 bp, Zea mays
aactttggtgacaggaacaaa

SEQ ID NO: 390 - DNA, 21 bp, Zea mays
gccgcctaggtctccgacgtg

SEQ ID NO: 391 - DNA, 21 bp, Zea mays
cgccgcggcgccgcctcggcg

SEQ ID NO: 392 - DNA, 21 bp, Zea mays
cgtgggtacccacgttcttaa

SEQ ID NO: 393 - DNA, 21 bp, Zea mays
tcgacctctgctgagcgcgct

SEQ ID NO: 394 - DNA, 21 bp, Zea mays
aggatgaagccgctctgttcc

SEQ ID NO: 395 - DNA, 21 bp, Zea mays
cagtgttgtccccagttgtcc

SEQ ID NO: 396 - DNA, 21 bp, Zea mays
gatgcattttgcgcatggaag

SEQ ID NO: 397 - DNA, 21 bp, Zea mays
gatgcattttgcgcatggagc

SEQ ID NO: 398 - DNA, 21 bp, Zea mays
agagcatctccaacaatgcct

SEQ ID NO: 399 - DNA, 21 bp, Zea mays
  unsure (21): n = A, C, G or T
tagtccctagaaaccaaacan

SEQ ID NO: 400 - DNA, 21 bp, Zea mays
gacacaaacgaacaagggcta

SEQ ID NO: 401 - DNA, 21 bp, Zea mays
gtgtacgactcgtctggcaag

SEQ ID NO: 402 - DNA, 21 bp, Zea mays
ttggcacggctcaatcagaaa

SEQ ID NO: 403 - DNA, 21 bp, Zea mays
tagtccctagaaaccaaacag

SEQ ID NO: 404 - DNA, 21 bp, Zea mays
agatcatgttgcagcttcact

SEQ ID NO: 405 - DNA, 21 bp, Zea mays
gacccggactaaactttagtc

SEQ ID NO: 406 - DNA, 21 bp, Zea mays
gtgctttttagtgtcgtgccc

SEQ ID NO: 407 - DNA, 21 bp, Zea mays
aggacttccgagtagcacctc

SEQ ID NO: 408 - DNA, 21 bp, Zea mays
gaaacgaacaaggcctaagct

SEQ ID NO: 409 - DNA, 21 bp, Zea mays
aggccttgttcgtttctatcg

SEQ ID NO: 410 - DNA, 21 bp, Zea mays
  unsure (19)..(20)..(21): n = A, C, G or T
agggcttgttcggttgcannn

SEQ ID NO: 411 - DNA, 21 bp, Zea mays
agactgtgtccaacaagcacc

SEQ ID NO: 412 - DNA, 21 bp, Zea mays
gtgagttgtgactgcgtgtcc

SEQ ID NO: 413 - DNA, 21 bp, Zea mays
ggatcggaccaaaacacgcgg

SEQ ID NO: 414 - DNA, 21 bp, Zea mays
cgtgggtacccacgttcttta

SEQ ID NO: 415 - DNA, 21 bp, Zea mays
gagggtgacttggccagccat

SEQ ID NO: 416 - DNA, 21 bp, Zea mays
gtggcaagagaattgaagaaa

SEQ ID NO: 417 - DNA, 21 bp, Zea mays
catcaaaactgagggcaccaa

SEQ ID NO: 418 - DNA, 21 bp, Zea mays
tcgtgcttcgtgccaaatgga

SEQ ID NO: 419 - DNA, 21 bp, Zea mays
agggctggacaaaatgctcgt

SEQ ID NO: 420 - DNA, 21 bp, Zea mays
gccataggctatggcgccgag

SEQ ID NO: 421 - DNA, 21 bp, Zea mays
catagcctatggcgccgagca

SEQ ID NO: 422 - DNA, 21 bp, Zea mays
cccgtgcgttgcgacggttca

SEQ ID NO: 423 - DNA, 21 bp, Zea mays
tagggctagtttgggagacac

SEQ ID NO: 424 - DNA, 21 bp, Zea mays
ccgagctcggcgccatagatt

SEQ ID NO: 425 - DNA, 21 bp, Zea mays
catagcctatggcgccgaggt

SEQ ID NO: 426 - DNA, 21 bp, Zea mays
tgcttatgggaagggagacag

SEQ ID NO: 427 - DNA, 21 bp, Zea mays
gtcttagggtccgcttgtgaa

SEQ ID NO: 428 - DNA, 21 bp, Zea mays
tgtgccagaccggcccacata

SEQ ID NO: 429 - DNA, 21 bp, Zea mays
gcacgacgaccgttgaaactg

SEQ ID NO: 430 - DNA, 21 bp, Zea mays
aaacgaacaaggcctaaagag

SEQ ID NO: 431 - DNA, 21 bp, Zea mays
aagaactaaccttaggcagaa

SEQ ID NO: 432 - DNA, 21 bp, Zea mays
cgcattggacttgcacgtgtg

SEQ ID NO: 433 - DNA, 21 bp, Zea mays
acagcctatggcgccgagtat

SEQ ID NO: 434 - DNA, 21 bp, Zea mays
cccccccccccccccccaatt

SEQ ID NO: 435 - DNA, 21 bp, Zea mays
cccgtgcgttgcaacgggaac

SEQ ID NO: 436 - DNA, 21 bp, Zea mays
gaagtggagtggagcgggcgc

SEQ ID NO: 437 - DNA, 21 bp, Zea mays
tggcagaaccggaatggtggc

SEQ ID NO: 438 - DNA, 21 bp, Zea mays
tagtccctagaaaccaatcac

SEQ ID NO: 439 - DNA, 21 bp, Zea mays
acggcccagcccgcgattcgt

SEQ ID NO: 440 - DNA, 21 bp, Zea mays
ctgtgccaaacagggcctaag

SEQ ID NO: 441 - DNA, 21 bp, Zea mays
ggtgacagagcctttgtcgag

SEQ ID NO: 442 - DNA, 21 bp, Zea mays
cacaaacgaacaagacctaaa

SEQ ID NO: 443 - DNA, 21 bp, Zea mays
gcagcaagactgacttcgcgg

SEQ ID NO: 444 - DNA, 21 bp, Zea mays
tagggctagtttgggagctac

SEQ ID NO: 445 - DNA, 21 bp, Zea mays
cctgagccaggctcaccagat

SEQ ID NO: 446 - DNA, 21 bp, Zea mays
ggactaagtattggctcggcg

SEQ ID NO: 447 - DNA, 21 bp, Zea mays
gcgagaggtcccgagttcaat

SEQ ID NO: 448 - DNA, 21 bp, Zea mays
ttggcacggctcaatcaatta

SEQ ID NO: 449 - DNA, 21 bp, Zea mays
gatgagctagcgcctgcgatt

SEQ ID NO: 450 - DNA, 21 bp, Zea mays
gtttggtttgtggctaaatgt

SEQ ID NO: 451 - DNA, 21 bp, Zea mays
gggcctgtttggtttgtagct

SEQ ID NO: 452 - DNA, 21 bp, Zea mays
cagtgttgtccccagttatcc

SEQ ID NO: 453 - DNA, 21 bp, Zea mays
atgtgttaaggtggattagga

SEQ ID NO: 454 - DNA, 21 bp, Zea mays
gaaaccgaacagggccttagt

SEQ ID NO: 455 - DNA, 21 bp, Zea mays
cactcggcaaagaacacttga

SEQ ID NO: 456 - DNA, 21 bp, Zea mays
tggcgcctgagaatccatagt

SEQ ID NO: 457 - DNA, 21 bp, Zea mays
aagggtgcgtttggttgcggg

SEQ ID NO: 458 - DNA, 21 bp, Zea mays
agagcaggctcggatgagcga

SEQ ID NO: 459 - DNA, 21 bp, Zea mays
gacacgctagatctgggggga

SEQ ID NO: 460 - DNA, 21 bp, Zea mays
gcacgtgattcacagggacat

SEQ ID NO: 461 - DNA, 21 bp, Zea mays
gatcgaaaaggccgtcccttt

SEQ ID NO: 462 - DNA, 21 bp, Zea mays
aacaaaactgggacagaacgg

SEQ ID NO: 463 - DNA, 21 bp, Zea mays
ttagctggaacgattccgggt

SEQ ID NO: 464 - DNA, 21 bp, Zea mays
ttctttgccgagtgccataac

SEQ ID NO: 465 - DNA, 21 bp, Zea mays
cgggcggcgggttcgcgtcgg

SEQ ID NO: 466 - DNA, 21 bp, Zea mays
tggcactcggcaaagaaccaa

SEQ ID NO: 467 - DNA, 21 bp, Zea mays
taaaaagaaatggagggagta

SEQ ID NO: 468 - DNA, 21 bp, Zea mays
gccatagcctatgacgccgag

SEQ ID NO: 469 - DNA, 21 bp, Zea mays
ggcccgtttggccatctatac

SEQ ID NO: 470 - DNA, 21 bp, Zea mays
cgtttgcgtcgcgctctatat

SEQ ID NO: 471 - DNA, 21 bp, Zea mays
gaaaccgaacagggcctaaag

SEQ ID NO: 472 - DNA, 21 bp, Zea mays
ttagctggaacgattcctggt

SEQ ID NO: 473 - DNA, 21 bp, Zea mays
cccgtgcgttgcaacggaaac

SEQ ID NO: 474 - DNA, 21 bp, Zea mays
aaaaagcactcgacaaaaaaa

SEQ ID NO: 475 - DNA, 21 bp, Zea mays
gggcctgtttggtttgtgtct

SEQ ID NO: 476 - DNA, 21 bp, Zea mays
ctaaacactatgctgtgggtc

SEQ ID NO: 477 - DNA, 21 bp, Zea mays
cactgtgcgccatcatcaaat

SEQ ID NO: 478 - DNA, 21 bp, Zea mays
cccgttcttgctacctgctaa

SEQ ID NO: 479 - DNA, 21 bp, Zea mays
atgtgcccgtgcgttgccacg

SEQ ID NO: 480 - DNA, 21 bp, Zea mays
ggacttggaggtgctactcga

SEQ ID NO: 481 - DNA, 21 bp, Zea mays
aaggctgtaaggggtaggctg

SEQ ID NO: 482 - DNA, 21 bp, Zea mays
cacagagtggtggagcgtgca

SEQ ID NO: 483 - DNA, 21 bp, Zea mays
gtcagtagcgacttacgtggc

SEQ ID NO: 484 - DNA, 21 bp, Zea mays
gaaaccgaacagggccttagg

SEQ ID NO: 485 - DNA, 21 bp, Zea mays
cggcaagttgtccttggctac

SEQ ID NO: 486 - DNA, 21 bp, Zea mays
ttgtgcgtccattggtgaccg

SEQ ID NO: 487 - DNA, 21 bp, Zea mays
acagcctatggcgccgagcaa

SEQ ID NO: 488 - DNA, 21 bp, Zea mays
tcaccagcgacgaggagcacc

SEQ ID NO: 489 - DNA, 21 bp, Zea mays
gtttggtttgtggctaatatg

SEQ ID NO: 490 - DNA, 21 bp, Zea mays
gccacactttgtctaagttta

SEQ ID NO: 491 - DNA, 21 bp, Zea mays
ctaaacactgtgctgtgggtc

SEQ ID NO: 492 - DNA, 21 bp, Zea mays
actggcaggtgatgtgccgcc

SEQ ID NO: 493 - DNA, 21 bp, Zea mays
aagcggaccctaagacaaaac

SEQ ID NO: 494 - DNA, 21 bp, Zea mays
tctgcattgccgaggctggtg

SEQ ID NO: 495 - DNA, 21 bp, Zea mays
tcccgtcagcagtagaggcgt

SEQ ID NO: 496 - DNA, 21 bp, Zea mays
tggatcagatggtttgctgac

SEQ ID NO: 497 - DNA, 21 bp, Zea mays
cacatttctctacggtgcacg

SEQ ID NO: 498 - DNA, 21 bp, Zea mays
gagagccacaaaaccggaagg

SEQ ID NO: 499 - DNA, 21 bp, Zea mays
cagggatgagacagagcatgg

SEQ ID NO: 500 - DNA, 21 bp, Zea mays
acagccgtcggacataagtta

SEQ ID NO: 501 - DNA, 21 bp, Zea mays
ccttgtgcaggcaaccaaaca

SEQ ID NO: 502 - DNA, 21 bp, Zea mays
aacatgatgccgcgggaaaca

SEQ ID NO: 503 - DNA, 21 bp, Zea mays
cttgggccgggccggcccggc

SEQ ID NO: 504 - DNA, 21 bp, Zea mays
aggccttgttcgtttgtgtta

SEQ ID NO: 505 - DNA, 21 bp, Zea mays
aaaacactcggcaaagaatct

SEQ ID NO: 506 - DNA, 21 bp, Zea mays
acggcggcgccggcggcgtca

SEQ ID NO: 507 - DNA, 21 bp, Zea mays
gttggctagagggtggaaggc

SEQ ID NO: 508 - DNA, 21 bp, Zea mays
tgcgtttggttgcaatgacat

SEQ ID NO: 509 - DNA, 21 bp, Zea mays
ggctgcaggagctgtgccaga

SEQ ID NO: 510 - DNA, 21 bp, Zea mays
agagcatctccaacaatgtgc

SEQ ID NO: 511 - DNA, 21 bp, Zea mays
tagtccctagaaaccaaacga

SEQ ID NO: 512 - DNA, 21 bp, Zea mays
cagacactcggcaaagtatat

SEQ ID NO: 513 - DNA, 21 bp, Zea mays
atgatgtgtttggttcggtgt

SEQ ID NO: 514 - DNA, 21 bp, Zea mays
cccgtgcgttgcgacggaacc

SEQ ID NO: 515 - DNA, 21 bp, Zea mays
gtgagtgtccgtgcgttgcaa

SEQ ID NO: 516 - DNA, 21 bp, Zea mays
catagcctatggcgccgagat

SEQ ID NO: 517 - DNA, 21 bp, Zea mays
  unsure (20)..(21): n = A, C, G or T
gccataggctatggcgccgnn

SEQ ID NO: 518 - DNA, 21 bp, Zea mays
  unsure (21): n = A, C, G or T
ccgcgggggtcgcctgaggtn

SEQ ID NO: 519 - DNA, 21 bp, Zea mays
agaacgtgaccagttaaacgg

SEQ ID NO: 520 - DNA, 21 bp, Zea mays
gtcaaagtaggatgagtcggg

SEQ ID NO: 521 - DNA, 21 bp, Zea mays
tcaccagcgctgcactcaatt

SEQ ID NO: 522 - DNA, 21 bp, Zea mays
tacactatagtgcctaatcgt

SEQ ID NO: 523 - DNA, 21 bp, Zea mays
agttttgtctcgcgggtatgg

SEQ ID NO: 524 - DNA, 21 bp, Zea mays
cgtgctttgaccgggtgggaa

SEQ ID NO: 525 - DNA, 21 bp, Zea mays
cactcggcaaagagccaaatt

SEQ ID NO: 526 - DNA, 21 bp, Zea mays
gatcaggttgcgttggtaatc

SEQ ID NO: 527 - DNA, 21 bp, Zea mays
aatccacatggattgagatga

SEQ ID NO: 528 - DNA, 21 bp, Zea mays
agagctgcaagcctgcaaaag

SEQ ID NO: 529 - DNA, 21 bp, Zea mays
aaaacactcggcaaagaattt

SEQ ID NO: 530 - DNA, 21 bp, Zea mays
aaggcctgtaggacttcgctc

SEQ ID NO: 531 - DNA, 21 bp, Zea mays
taggatgtgtttggttgcaat

SEQ ID NO: 532 - DNA, 21 bp, Zea mays
taggcagattgtggcgcttta

SEQ ID NO: 533 - DNA, 21 bp, Zea mays
gaactgcgcagatcgacgacg

SEQ ID NO: 534 - DNA, 21 bp, Zea mays
gctaacttcctagaggctaca

SEQ ID NO: 535 - DNA, 21 bp, Zea mays
ggtgacctggcgcgcacggta

SEQ ID NO: 536 - DNA, 21 bp, Zea mays
tagggctagtttgggagttca

SEQ ID NO: 537 - DNA, 21 bp, Zea mays
ggtgctagcacggcacaatct

SEQ ID NO: 538 - DNA, 21 bp, Zea mays
gtggcaaacagtttgtcggct

SEQ ID NO: 539 - DNA, 21 bp, Zea mays
taggcagattgtggcgcctta

SEQ ID NO: 540 - DNA, 21 bp, Zea mays
gtatcgcacgagacaggctag

SEQ ID NO: 541 - DNA, 21 bp, Zea mays
ctttgccgagtgttttttttt

SEQ ID NO: 542 - DNA, 21 bp, Zea mays
gttttggaccctttgctcggc

SEQ ID NO: 543 - DNA, 21 bp, Zea mays
cacgagtcgagcgagcttaca

SEQ ID NO: 544 - DNA, 21 bp, Zea mays
ccgggtgcaatccgacgtaaa

SEQ ID NO: 545 - DNA, 21 bp, Zea mays
cctatggcgccgagcaaaggg

SEQ ID NO: 546 - DNA, 21 bp, Zea mays
ttttacatcacaggcggttcg

SEQ ID NO: 547 - DNA, 21 bp, Zea mays
ccgtgcgttgcgacggtacac

SEQ ID NO: 548 - DNA, 21 bp, Zea mays
aagcctttgccgagtgtcgca

SEQ ID NO: 549 - DNA, 21 bp, Zea mays
tcgaggacgagctgcttgtct

SEQ ID NO: 550 - DNA, 21 bp, Zea mays
gccacactttgcctaagttta

SEQ ID NO: 551 - DNA, 21 bp, Zea mays
cgtgggtacccacgttcctaa

SEQ ID NO: 552 - DNA, 21 bp, Zea mays
gacacaaacgaacaaggtcta

SEQ ID NO: 553 - DNA, 21 bp, Zea mays
ggtagcgggtgcgtgtacgag

SEQ ID NO: 554 - DNA, 21 bp, Zea mays
tcgcgagctaaacgagctacc

SEQ ID NO: 555 - DNA, 21 bp, Zea mays
gctgtgggcgtgcaaatttag

SEQ ID NO: 556 - DNA, 21 bp, Zea mays
gacacaaacgaacaaggctta

SEQ ID NO: 557 - DNA, 21 bp, Zea mays
gactggcgggacacgtgtcca

SEQ ID NO: 558 - DNA, 21 bp, Zea mays
gaaaaaatctcttgcacctaa

SEQ ID NO: 559 - DNA, 21 bp, Zea mays
cactcggcaaagcccccttta

SEQ ID NO: 560 - DNA, 21 bp, Zea mays
agcggctcgtttgaccgtctg

SEQ ID NO: 561 - DNA, 21 bp, Zea mays
aggcaaagtgtgataagttag

SEQ ID NO: 562 - DNA, 21 bp, Zea mays
gaaaccgaacagggccttata

SEQ ID NO: 563 - DNA, 21 bp, Zea mays
atgtgcccgtgcgttgcttag

SEQ ID NO: 564 - DNA, 21 bp, Zea mays
aagtctgcttgcacgcttgca

SEQ ID NO: 565 - DNA, 21 bp, Zea mays
ttagctggaacgattccggtg

SEQ ID NO: 566 - DNA, 21 bp, Zea mays
actagccaggatttggtgggc

SEQ ID NO: 567 - DNA, 21 bp, Zea mays
gccaagatctatggcgccgac

SEQ ID NO: 568 - DNA, 21 bp, Zea mays
ccatagatcttggcgccgacc

SEQ ID NO: 569 - DNA, 21 bp, Zea mays
ctgtgccaaacagggccatta

SEQ ID NO: 570 - DNA, 21 bp, Zea mays
aaacgaacaaggcctaaggtt

SEQ ID NO: 571 - DNA, 21 bp, Zea mays
gcaggacgaccattgaaactg

SEQ ID NO: 572 - DNA, 21 bp, Zea mays
ccagactgtttgcagcccctc

SEQ ID NO: 573 - DNA, 21 bp, Zea mays
caagtgctcggtcgaagactt

SEQ ID NO: 574 - DNA, 21 bp, Zea mays
aactgacaggccgcagtgatg

SEQ ID NO: 575 - DNA, 21 bp, Zea mays
atcaggggcggacctacgtta

SEQ ID NO: 576 - DNA, 21 bp, Zea mays
acagttagcaggccggcatga

SEQ ID NO: 577 - DNA, 21 bp, Zea mays
tagtccctagaaaccaaacgc

SEQ ID NO: 578 - DNA, 21 bp, Zea mays
cccgtgcgttgcaacggcaaa

SEQ ID NO: 579 - DNA, 21 bp, Zea mays
taggatgtgtttggttgtaat

SEQ ID NO: 580 - DNA, 21 bp, Zea mays
agaacggagcgtcaacgtcca

SEQ ID NO: 581 - DNA, 21 bp, Zea mays
agagcatctccaacaatatct

SEQ ID NO: 582 - DNA, 21 bp, Zea mays
atcccactcacgtgtcacgtc

SEQ ID NO: 583 - DNA, 21 bp, Zea mays
accgtacttgtgccagcacgt

SEQ ID NO: 584 - DNA, 21 bp, Zea mays
gaggcgtaggcgagggattag

SEQ ID NO: 585 - DNA, 21 bp, Zea mays
gctgatttggtgaccaggaat

SEQ ID NO: 586 - DNA, 21 bp, Zea mays
gtgtgcacgcctacactacgt

SEQ ID NO: 587 - DNA, 21 bp, Zea mays
ttaacgagccagctcgcgagc

SEQ ID NO: 588 - DNA, 21 bp, Zea mays
cccgtgcgttgcaacggaaat

SEQ ID NO: 589 - DNA, 21 bp, Zea mays
aaagactttgccgagtgtcaa

SEQ ID NO: 590 - DNA, 21 bp, Zea mays
tcgcgagctaaacgagccaac

SEQ ID NO: 591 - DNA, 21 bp, Zea mays
ggcaaagtgtggcaagttagt

SEQ ID NO: 592 - DNA, 21 bp, Zea mays
gtgccaaccagactgcctcgc

SEQ ID NO: 593 - DNA, 21 bp, Zea mays
gatggacggccaagtcactcc

SEQ ID NO: 594 - DNA, 21 bp, Zea mays
agagctaaccgaacaagccgt

SEQ ID NO: 595 - DNA, 21 bp, Zea mays
aagatctatggcgccgagctc

SEQ ID NO: 596 - DNA, 21 bp, Zea mays
gccaagatctatggcgccgag

SEQ ID NO: 597 - DNA, 21 bp, Zea mays
ctgcgtgcagatgtggagcca

SEQ ID NO: 598 - DNA, 21 bp, Zea mays
gacacaaacgaacaaggttta

SEQ ID NO: 599 - DNA, 21 bp, Zea mays
tgaggccttgttcgtttacgt

SEQ ID NO: 600 - DNA, 21 bp, Zea mays
gtatccgacccgataggaccc

SEQ ID NO: 601 - DNA, 21 bp, Zea mays
ctgacgcagcaccattggatg

SEQ ID NO: 602 - DNA, 21 bp, Zea mays
accattggatgtggagggtat

SEQ ID NO: 603 - DNA, 21 bp, Zea mays
ctgtgccaaacagggcctaaa

SEQ ID NO: 604 - DNA, 21 bp, Zea mays
ataactaaccttaggtagaaa

SEQ ID NO: 605 - DNA, 21 bp, Zea mays
gtgtgactgatggtgggtcgc

SEQ ID NO: 606 - DNA, 21 bp, Zea mays
aagcccggcacggctattgaa

SEQ ID NO: 607 - DNA, 21 bp, Zea mays
gctaacttcctagaggcagcc

SEQ ID NO: 608 - DNA, 21 bp, Zea mays
aggtttccggcgtgcgcaggt

SEQ ID NO: 609 - DNA, 21 bp, Zea mays
gatgcattttgcgcatgggaa

SEQ ID NO: 610 - DNA, 21 bp, Zea mays
ataggctatgacgccgagctc

SEQ ID NO: 611 - DNA, 21 bp, Zea mays
aagagggtgtttggttgctgc

SEQ ID NO: 612 - DNA, 21 bp, Zea mays
cgaacgacgacaaccggtgag

SEQ ID NO: 613 - DNA, 21 bp, Zea mays
gaattcttgtgcgctgggacg

SEQ ID NO: 614 - DNA, 21 bp, Zea mays
atgggcctgtttggtttgtgt

SEQ ID NO: 615 - DNA, 21 bp, Zea mays
gcaaagcctttgccgagtgtt

SEQ ID NO: 616 - DNA, 21 bp, Zea mays
ttagctggaacgattccggtt

SEQ ID NO: 617 - DNA, 21 bp, Zea mays
gctgatttggtgaccagggaa

SEQ ID NO: 618 - DNA, 21 bp, Zea mays
agcagctgtgccaaacaaggc

SEQ ID NO: 619 - DNA, 21 bp, Zea mays
aggccttgttcgtttgtatcg

SEQ ID NO: 620 - DNA, 21 bp, Zea mays
ccgcgggggtcgcctgaggta

SEQ ID NO: 621 - DNA, 21 bp, Zea mays
atcgtcgtcgtcggccacggc

SEQ ID NO: 622 - DNA, 21 bp, Zea mays
ccgcgcttggggtcgacttgg

SEQ ID NO: 623 - DNA, 21 bp, Zea mays
tcattctaacagactctccaa

SEQ ID NO: 624 - DNA, 21 bp, Zea mays
gacacaaacgaacaaggacta

SEQ ID NO: 625 - DNA, 21 bp, Zea mays
aaggccttgttcgtttgtgac

SEQ ID NO: 626 - DNA, 21 bp, Zea mays
tagactatgtgtgtgggtcgg

SEQ ID NO: 627 - DNA, 21 bp, Zea mays
cagcaaaactgagggcacacg

SEQ ID NO: 628 - DNA, 21 bp, Zea mays
aaataaaaagaaacggaggga

SEQ ID NO: 629 - DNA, 21 bp, Zea mays
aattagaccatatttaatact

SEQ ID NO: 630 - DNA, 21 bp, Zea mays
tccaaatggtttaggattagg

SEQ ID NO: 631 - DNA, 21 bp, Zea mays
gaggctgaagctgagtcgcga

SEQ ID NO: 632 - DNA, 21 bp, Zea mays
ttgacagaagagagcgagcac

SEQ ID NO: 633 - DNA, 21 bp, Zea mays
aggaggaggccgggaagcggc

SEQ ID NO: 634 - DNA, 21 bp, Zea mays
gtgtctatgatttgtgggtcc

SEQ ID NO: 635 - DNA, 21 bp, Zea mays
tccgacccaccaatccagcag

SEQ ID NO: 636 - DNA, 21 bp, Zea mays
aaataaaaagaaacggagggg

SEQ ID NO: 637 - DNA, 21 bp, Zea mays
aaattagttttataatttgac

SEQ ID NO: 638 - DNA, 21 bp, Zea mays
ggcagtctccttggctagtcc

SEQ ID NO: 639 - DNA, 21 bp, Zea mays
gacggctgagatcgcagaatg

SEQ ID NO: 640 - DNA, 21 bp, Zea mays
gtcgcggggatagggcggacg

SEQ ID NO: 641 - DNA, 21 bp, Zea mays
gccataggctgtggcgctgag

SEQ ID NO: 642 - DNA, 21 bp, Zea mays
cacagcctatggcgccgagct

SEQ ID NO: 643 - DNA, 21 bp, Zea mays
cctgtttggttcgtggctaac

SEQ ID NO: 644 - DNA, 21 bp, Zea mays
ttagccacgaaccaaacaggt

SEQ ID NO: 645 - DNA, 21 bp, Zea mays
cacaaaaatgaggatagactc

SEQ ID NO: 646 - DNA, 21 bp, Zea mays
gaggaatggacccatgatgca

SEQ ID NO: 647 - DNA, 21 bp, Zea mays
ggcgtcgtcgtcggatgcggt

SEQ ID NO: 648 - DNA, 21 bp, Zea mays
agctcggcgccaagatctgtg

SEQ ID NO: 649 - DNA, 21 bp, Zea mays
tcctgcctcgatgccggcggc

SEQ ID NO: 650 - DNA, 21 bp, Zea mays
tgcccgtgcgttgcaacggta

SEQ ID NO: 651 - DNA, 21 bp, Zea mays
tcgtgatccattaccacccct

SEQ ID NO: 652 - DNA, 21 bp, Zea mays
cacaaaaatgaggataggtcc

SEQ ID NO: 653 - DNA, 21 bp, Zea mays
gttggaccgttgcagagtgga

SEQ ID NO: 654 - DNA, 21 bp, Zea mays
gccggattggtgggtcggaac

SEQ ID NO: 655 - DNA, 21 bp, Zea mays
gcctgtttggttcgtggctaa

SEQ ID NO: 656 - DNA, 21 bp, Zea mays
tggtgcacggttctgccatac

SEQ ID NO: 657 - DNA, 21 bp, Zea mays
acagttagccacgaaccaaac

SEQ ID NO: 658 - DNA, 21 bp, Zea mays
agggtctgtttggttcgtggc

SEQ ID NO: 659 - DNA, 21 bp, Zea mays
aggcggttttgtcttagggtc

SEQ ID NO: 660 - DNA, 21 bp, Zea mays
cggacgaaaccggtatgagcc

SEQ ID NO: 661 - DNA, 21 bp, Zea mays
ttagccacgaaccaaacatgc

SEQ ID NO: 662 - DNA, 21 bp, Zea mays
gtgtcggattgcactcgaaat

SEQ ID NO: 663 - DNA, 21 bp, Zea mays
gtggccgccgacgacgacggc

SEQ ID NO: 664 - DNA, 21 bp, Zea mays
ggtaccgtcgaacttaatggg

SEQ ID NO: 665 - DNA, 21 bp, Zea mays
cctcacaaaaaggaggataga

SEQ ID NO: 666 - DNA, 21 bp, Zea mays
tgggtatgctgctcaagttct

SEQ ID NO: 667 - DNA, 21 bp, Zea mays
cttttcgggcttgggccggac

SEQ ID NO: 668 - DNA, 21 bp, Zea mays
agtccctagaaaccaaacaac

SEQ ID NO: 669 - DNA, 21 bp, Zea mays
agtccctagaaaccaaacatc

SEQ ID NO: 670 - DNA, 21 bp, Zea mays
ctaagggccagtttggtaact

SEQ ID NO: 671 - DNA, 21 bp, Zea mays
ccggtcatgtgatgagtggcg

SEQ ID NO: 672 - DNA, 21 bp, Zea mays
acacaaacgaacaaggcctta

SEQ ID NO: 673 - DNA, 21 bp, Zea mays
ttagccacgaaccaaacaggc

SEQ ID NO: 674 - DNA, 21 bp, Zea mays
ccgcgccagattggcctccac

SEQ ID NO: 675 - DNA, 21 bp, Zea mays
ggactggccgactgggagaga

SEQ ID NO: 676 - DNA, 21 bp, Zea mays
aaagtcaaacgcttgatgtga

SEQ ID NO: 677 - DNA, 21 bp, Zea mays
cgggctaaactttagcagggg

SEQ ID NO: 678 - DNA, 21 bp, Zea mays
gggcctgtttggtttgatgcc

SEQ ID NO: 679 - DNA, 21 bp, Zea mays
ttgcaacgcacgggcacatac

SEQ ID NO: 680 - DNA, 21 bp, Zea mays
agcgggagagcaagcagaccg

SEQ ID NO: 681 - DNA, 21 bp, Zea mays
ttagccacgaaccaaacaagc

SEQ ID NO: 682 - DNA, 21 bp, Zea mays
agccggctgcaaaccaggata

SEQ ID NO: 683 - DNA, 21 bp, Zea mays
cacctcgtacacggccgccga

SEQ ID NO: 684 - DNA, 21 bp, Zea mays
gggggtgtttggtttctaagg

SEQ ID NO: 685 - DNA, 21 bp, Zea mays
caatcccctccggttttgtgg

SEQ ID NO: 686 - DNA, 21 bp, Zea mays
gagccacaaaaccggagggga

SEQ ID NO: 687 - DNA, 21 bp, Zea mays
ggaggggattggaggggctag

SEQ ID NO: 688 - DNA, 21 bp, Zea mays
ggagctatcccaaacagtgcc

SEQ ID NO: 689 - DNA, 21 bp, Zea mays
ccctaatcaccaaatcagccc

SEQ ID NO: 690 - DNA, 21 bp, Zea mays
aagggctgatttggtgacccg

SEQ ID NO: 691 - DNA, 21 bp, Zea mays
gggacggatacaggacgggac

SEQ ID NO: 692 - DNA, 21 bp, Zea mays
ggagatgaagggcgtcggggg

SEQ ID NO: 693 - DNA, 21 bp, Zea mays
gggcctgtttggtttgatgac

SEQ ID NO: 694 - DNA, 21 bp, Zea mays
cctgtttggttcgtggctata

SEQ ID NO: 695 - DNA, 21 bp, Zea mays
gctgtctacgatgccgtcgga

SEQ ID NO: 696 - DNA, 21 bp, Zea mays
tcggcggcgaggtactccagg

SEQ ID NO: 697 - DNA, 21 bp, Zea mays
cagatcttggcgccgaggtgt

SEQ ID NO: 698 - DNA, 21 bp, Zea mays
ctcgcgagctaaacgagccga

SEQ ID NO: 699 - DNA, 21 bp, Zea mays
gggcctgtttggtttgatggc

SEQ ID NO: 700 - DNA, 21 bp, Zea mays
actaaggggctgtttggttcg

SEQ ID NO: 701 - DNA, 21 bp, Zea mays
actgctgacgggagggaaggg

SEQ ID NO: 702 - DNA, 21 bp, Zea mays
agggtctgtttggttcgtgac

SEQ ID NO: 703 - DNA, 21 bp, Zea mays
aggtgagtgcccgtgcgatgc

SEQ ID NO: 704 - DNA, 21 bp, Zea mays
gctgctggtcctgtgcgctgt

SEQ ID NO: 705 - DNA, 21 bp, Zea mays
gggcctgtttggtttgtgcct

SEQ ID NO: 706 - DNA, 21 bp, Zea mays
aggtgagtgcccgtgcgttgc

SEQ ID NO: 707 - DNA, 21 bp, Zea mays
ggacggctgagatcgcagaat

SEQ ID NO: 708 - DNA, 21 bp, Zea mays
cacccccccccccccccccca

SEQ ID NO: 709 - DNA, 21 bp, Zea mays
caaagatccctcggtgctccg

SEQ ID NO: 710 - DNA, 21 bp, Zea mays
gaaccaaacaggcccataacc

SEQ ID NO: 711 - DNA, 21 bp, Zea mays
tgggcctgtttggttcgtggc

SEQ ID NO: 712 - DNA, 21 bp, Zea mays
ggccacgagcgtgcccgccca

SEQ ID NO: 713 - DNA, 21 bp, Zea mays
aagggctgatttggtgactag

SEQ ID NO: 714 - DNA, 21 bp, Zea mays
cccccaaggcaggcatgggcc

SEQ ID NO: 715 - DNA, 21 bp, Zea mays
cgagtctcaaattccgacccg

SEQ ID NO: 716 - DNA, 21 bp, Zea mays
gtggtccggcggcaggaaccg

SEQ ID NO: 717 - DNA, 21 bp, Zea mays
acaaaccaaacaagccctagt

SEQ ID NO: 718 - DNA, 21 bp, Zea mays
cttgggccagattggagtttc

SEQ ID NO: 719 - DNA, 21 bp, Zea mays
accaacgacctccgggccgaa

SEQ ID NO: 720 - DNA, 21 bp, Zea mays
ggagctatcccaaacagagcc

SEQ ID NO: 721 - DNA, 21 bp, Zea mays
cagagcggttgaggtcgtggg

SEQ ID NO: 722 - DNA, 21 bp, Zea mays
cagtcccgcgtgtcagtgacc

SEQ ID NO: 723 - DNA, 21 bp, Zea mays
gaaccaaacagcacgctaagt

SEQ ID NO: 724 - DNA, 21 bp, Zea mays
cggaatcgcgttctttgccga

SEQ ID NO: 725 - DNA, 21 bp, Zea mays
aagggctgatttggtgaccag

SEQ ID NO: 726 - DNA, 21 bp, Zea mays
gttcgtcgccggagagtcgcc

SEQ ID NO: 727 - DNA, 21 bp, Zea mays
caccggacgcaccgattttca

SEQ ID NO: 728 - DNA, 21 bp, Zea mays
gttcgtttccgtcggattgca

SEQ ID NO: 729 - DNA, 21 bp, Zea mays
ccgacgaagcaggggctgcga

SEQ ID NO: 730 - DNA, 21 bp, Zea mays
agggctctacacaggaaaaac

SEQ ID NO: 731 - DNA, 21 bp, Zea mays
agaactgctgctgctgctggt

SEQ ID NO: 732 - DNA, 21 bp, Zea mays
ttccttatgtccgacggcttt

SEQ ID NO: 733 - DNA, 21 bp, Zea mays
cctcacaaaaaggaggataaa

SEQ ID NO: 734 - DNA, 21 bp, Zea mays
tgtgaggggctgcaaacagcc

SEQ ID NO: 735 - DNA, 21 bp, Zea mays
caggctgtttgcagcccctca

SEQ ID NO: 736 - DNA, 21 bp, Zea mays
ttcgtttgcgtcggattgcac

SEQ ID NO: 737 - DNA, 21 bp, Zea mays
gttcgtttccgtcggattggt

SEQ ID NO: 738 - DNA, 21 bp, Zea mays
aaacttggaacggttctgggc

SEQ ID NO: 739 - DNA, 21 bp, Zea mays
gggggtgtttggtttctatga

SEQ ID NO: 740 - DNA, 21 bp, Zea mays
gtgctcgtgccacgtgctgct

SEQ ID NO: 741 - DNA, 21 bp, Zea mays
gagggtgcgaatgttgcggtt

SEQ ID NO: 742 - DNA, 21 bp, Zea mays
gatctgtgtttgtgggcctcc

SEQ ID NO: 743 - DNA, 21 bp, Zea mays
acgcccttgacaacctggtat

SEQ ID NO: 744 - DNA, 21 bp, Zea mays
ggaacgattccgggtgcaatc

SEQ ID NO: 745 - DNA, 21 bp, Zea mays
ggttacgatgtcctatgcgcc

SEQ ID NO: 746 - DNA, 21 bp, Zea mays
caaagatccctcggtgctttg

SEQ ID NO: 747 - DNA, 21 bp, Zea mays
cccctccctccctccctccca

SEQ ID NO: 748 - DNA, 21 bp, Zea mays
gacggtgacggtgacggcgac

SEQ ID NO: 749 - DNA, 21 bp, Zea mays
agggctgatttggtgaccggg

SEQ ID NO: 750 - DNA, 21 bp, Zea mays
tgtccgtgcgttgcgacggga

SEQ ID NO: 751 - DNA, 21 bp, Zea mays
gggtcccgctctggctgattg

SEQ ID NO: 752 - DNA, 21 bp, Zea mays
cttgcacgcttgcacataaga

SEQ ID NO: 753 - DNA, 21 bp, Zea mays
acatccctgtcctggttgtcc

SEQ ID NO: 754 - DNA, 21 bp, Zea mays
tgaaccaaacaggccctttcg

SEQ ID NO: 755 - DNA, 21 bp, Zea mays
ggtgactggtccagtgctcac

SEQ ID NO: 756 - DNA, 21 bp, Zea mays
cagcgcaccacgtacaggtct

SEQ ID NO: 757 - DNA, 21 bp, Zea mays
cgttccgacccaccaatccag

SEQ ID NO: 758 - DNA, 21 bp, Zea mays
ccgagctggattgcttctcta

SEQ ID NO: 759 - DNA, 21 bp, Zea mays
gcagcggctgctggctccggc

SEQ ID NO: 760 - DNA, 21 bp, Zea mays
agtccctagaaaccaaatact

SEQ ID NO: 761 - DNA, 21 bp, Zea mays
ataggttgtttttcagaaaga

SEQ ID NO: 762 - DNA, 21 bp, Zea mays
gaaccgaaccgaagaaccgag

SEQ ID NO: 763 - DNA, 21 bp, Zea mays
ccgaactaaccgaaccgagga

SEQ ID NO: 764 - DNA, 21 bp, Zea mays
caggccttgttcgtttgtacc

SEQ ID NO: 765 - DNA, 21 bp, Zea mays
gtagcagtgcttgcgtgctag

SEQ ID NO: 766 - DNA, 21 bp, Zea mays
agacgaccgacggcggcgtct

SEQ ID NO: 767 - DNA, 21 bp, Zea mays
caaccaaacgcaccctaagtt

SEQ ID NO: 768 - DNA, 21 bp, Zea mays
cgagctgtgttacctcggcgc

SEQ ID NO: 769 - DNA, 21 bp, Zea mays
gccagaaattgtgtgctttgg

SEQ ID NO: 770 - DNA, 21 bp, Zea mays
gcatcgttcacgtgggcgaga

SEQ ID NO: 771 - DNA, 21 bp, Zea mays
agggctgatttggtgacccgg

SEQ ID NO: 772 - DNA, 21 bp, Zea mays
tcccctccggttttgtggcta

SEQ ID NO: 773 - DNA, 21 bp, Zea mays
aaaaagcactcggcaaagcgc

SEQ ID NO: 774 - DNA, 21 bp, Zea mays
cacgggtacgggtttgggacg

SEQ ID NO: 775 - DNA, 21 bp, Zea mays
gtgagagaggagagcggagga

SEQ ID NO: 776 - DNA, 21 bp, Zea mays
gctcacaaggtgccacggccc

SEQ ID NO: 777 - DNA, 21 bp, Zea mays
cagcgcaccacgtacaggtcg

SEQ ID NO: 778 - DNA, 21 bp, Zea mays
gcagcggctgctggctcccac

SEQ ID NO: 779 - DNA, 21 bp, Zea mays
aggcaggcaggcaggcagaca

SEQ ID NO: 780 - DNA, 21 bp, Zea mays
caccacaactgcggcgcggga

SEQ ID NO: 781 - DNA, 21 bp, Zea mays
gggggtgtttggtttctagag

SEQ ID NO: 782 - DNA, 21 bp, Zea mays
tgcgtcgtgcgggctgctcga

SEQ ID NO: 783 - DNA, 21 bp, Zea mays
caggccttgttcgtttgggtc

SEQ ID NO: 784 - DNA, 21 bp, Zea mays
ctggcacgtgacccgaaccgg

SEQ ID NO: 785 - DNA, 21 bp, Zea mays
gacttttctggcaagtcgggc

SEQ ID NO: 786 - DNA, 21 bp, Zea mays
gttcgtttccgtcggattata

SEQ ID NO: 787 - DNA, 21 bp, Zea mays
cgaggccgtggaatgcggacg

SEQ ID NO: 788 - DNA, 21 bp, Zea mays
gagggctagtttgggagccac

SEQ ID NO: 789 - DNA, 21 bp, Zea mays
gggggtgtttggtttctaaga

SEQ ID NO: 790 - DNA, 21 bp, Zea mays
gaggaatggacccatgatgta

SEQ ID NO: 791 - DNA, 21 bp, Zea mays
atgtttggtttgtggctaact

SEQ ID NO: 792 - DNA, 21 bp, Zea mays
caggggcagagatccgcgcca

SEQ ID NO: 793 - DNA, 21 bp, Zea mays
agcaacttcttaagttgtggg

SEQ ID NO: 794 - DNA, 21 bp, Zea mays
aagggctgatttggtgatcag

SEQ ID NO: 795 - DNA, 21 bp, Zea mays
ccttcagccttgaccaacctc

SEQ ID NO: 796 - DNA, 21 bp, Zea mays
agtcagccgtaggaagttagt

SEQ ID NO: 797 - DNA, 21 bp, Zea mays
gggggtgtttggtttctatgg

SEQ ID NO: 798 - DNA, 21 bp, Zea mays
gctcgacagggacttggtcgt

SEQ ID NO: 799 - DNA, 21 bp, Zea mays
ttgcaacgcacgggcactcac

SEQ ID NO: 800 - DNA, 21 bp, Zea mays
agtccctagaaaccaaacact

SEQ ID NO: 801 - DNA, 21 bp, Zea mays
ttgcaacgcacgggcactgac

SEQ ID NO: 802 - DNA, 21 bp, Zea mays
gggccattgcagagtgggcgg

SEQ ID NO: 803 - DNA, 21 bp, Zea mays
ttttcatctcccgcagcggtt

SEQ ID NO: 804 - DNA, 21 bp, Zea mays
gagtcatgttggctagaggat

SEQ ID NO: 805 - DNA, 21 bp, Zea mays
gtgttggcggctagctcccat

SEQ ID NO: 806 - DNA, 21 bp, Zea mays
aagggctgatttggtgaccct

SEQ ID NO: 807 - DNA, 21 bp, Zea mays
cacgaccgtgatggacctaac

SEQ ID NO: 808 - DNA, 21 bp, Zea mays
ttagccacgaaccaaacaacc

SEQ ID NO: 809 - DNA, 21 bp, Zea mays
accaacgacctccgggcagag

SEQ ID NO: 810 - DNA, 21 bp, Zea mays
ttagccacgaaccaaacgacg

SEQ ID NO: 811 - DNA, 21 bp, Zea mays
agtccctagaaaccaaacccc

SEQ ID NO: 812 - DNA, 21 bp, Zea mays
gttcgtttccgtcggatggca

SEQ ID NO: 813 - DNA, 21 bp, Zea mays
gcaaccgaacaggcccttagg

SEQ ID NO: 814 - DNA, 21 bp, Zea mays
gaaccaaacaggccctaagtg

SEQ ID NO: 815 - DNA, 21 bp, Zea mays
cagagacaggcgtgtgggtcc

SEQ ID NO: 816 - DNA, 21 bp, Zea mays
ggtacaaccgaacgggccctt

SEQ ID NO: 817 - DNA, 21 bp, Zea mays
ttcttcgcgggtacgggtttg

SEQ ID NO: 818 - DNA, 21 bp, Zea mays
agtccctagaaaccaaacaca

SEQ ID NO: 819 - DNA, 21 bp, Zea mays
aagggctgatttggtgatcaa

SEQ ID NO: 820 - DNA, 21 bp, Zea mays
gtggcatcgcacgggcaccta

SEQ ID NO: 821 - DNA, 21 bp, Zea mays
aagcggcacactgcgtagcgc

SEQ ID NO: 822 - DNA, 21 bp, Zea mays
gcccgcccgcccgcccgcgtg

SEQ ID NO: 823 - DNA, 21 bp, Zea mays
ttagccacgaaccaaacatgt

SEQ ID NO: 824 - DNA, 21 bp, Zea mays
ccgctaagccgtcggacataa

SEQ ID NO: 825 - DNA, 21 bp, Zea mays
agaggccagaggcccaatcct

SEQ ID NO: 826 - DNA, 21 bp, Zea mays
agtgctggcacggacacaata

SEQ ID NO: 827 - DNA, 21 bp, Zea mays
ttagccacgaaccaaacgtgc

SEQ ID NO: 828 - DNA, 21 bp, Zea mays
cgtgggaggccgtgtcgcaga

SEQ ID NO: 829 - DNA, 21 bp, Zea mays
tgctcgtacgatgccacggaa

SEQ ID NO: 830 - DNA, 21 bp, Zea mays
ggagctatcccaaacagggtc

SEQ ID NO: 831 - DNA, 21 bp, Zea mays
gggcacagctgagcaaaaaac

SEQ ID NO: 832 - DNA, 21 bp, Zea mays
cgggtcttcggctgcctcgcg

SEQ ID NO: 833 - DNA, 21 bp, Zea mays
acacaaacgaacaaggcccaa

SEQ ID NO: 834 - DNA, 21 bp, Zea mays
gcgatggcggcggtgtcccgg

SEQ ID NO: 835 - DNA, 21 bp, Zea mays
gtggcaagttaggcatcaaac

SEQ ID NO: 836 - DNA, 21 bp, Zea mays
gttgacgccggcccgttagtg

SEQ ID NO: 837 - DNA, 21 bp, Zea mays
ccacaaaccaaacaggcccga

SEQ ID NO: 838 - DNA, 21 bp, Zea mays
tgcggtgcccgccgcccggca

SEQ ID NO: 839 - DNA, 21 bp, Zea mays
agactcagctagtgcttatgg

SEQ ID NO: 840 - DNA, 21 bp, Zea mays
ccttgttggaggcgtagggga

SEQ ID NO: 841 - DNA, 21 bp, Zea mays
  unsure (20)..(21): n = A, C, G or T
agtccctagaaaccaaacann

SEQ ID NO: 842 - DNA, 21 bp, Zea mays
gacgacgacggaggcgagagg

SEQ ID NO: 843 - DNA, 21 bp, Zea mays
tcggctcggctcggctctctt

SEQ ID NO: 844 - DNA, 21 bp, Zea mays
ggaacaacaggcaccgagatc

SEQ ID NO: 845 - DNA, 21 bp, Zea mays
aggctatctccagcaggtttg

SEQ ID NO: 846 - DNA, 21 bp, Zea mays
aggctaatccaacagacttgg

SEQ ID NO: 847 - DNA, 21 bp, Zea mays
gagggctagtttgggagtcca

SEQ ID NO: 848 - DNA, 21 bp, Zea mays
cgagctccaggcgaggcggct

SEQ ID NO: 849 - DNA, 21 bp, Zea mays
catgggccaggctgggccaaa

SEQ ID NO: 850 - DNA, 21 bp, Zea mays
aggcaaagtgtgacaagttag

SEQ ID NO: 851 - DNA, 21 bp, Zea mays
gtacgaggccgtcggagataa

SEQ ID NO: 852 - DNA, 21 bp, Zea mays
tttttgacactcggcaaagag

SEQ ID NO: 853 - DNA, 21 bp, Zea mays
agagcttcttcgccgagtgtt

SEQ ID NO: 854 - DNA, 21 bp, Zea mays
ggctgcgttggtaatcggctg

SEQ ID NO: 855 - DNA, 21 bp, Zea mays
cgtgccaaatggattcgaacc

SEQ ID NO: 856 - DNA, 21 bp, Zea mays
aggtgagtgcccgtgcgttac

SEQ ID NO: 857 - DNA, 21 bp, Zea mays
aggtgagtgcccgtgcgtcgc

SEQ ID NO: 858 - DNA, 21 bp, Zea mays
ctgtcccggctactgcaactc

SEQ ID NO: 859 - DNA, 21 bp, Zea mays
ctggacaaaatgctcgttgtt

SEQ ID NO: 860 - DNA, 21 bp, Zea mays
atagcctatggcgccgagcat

SEQ ID NO: 861 - DNA, 21 bp, Zea mays
caccaccaggaggagggtaca

SEQ ID NO: 862 - DNA, 21 bp, Zea mays
ccctggggcccattggtcaga

SEQ ID NO: 863 - DNA, 21 bp, Zea mays
tatagcgccgagcaaagggtc

SEQ ID NO: 864 - DNA, 21 bp, Zea mays
cgcgtgctagggtttggcgcc

SEQ ID NO: 865 - DNA, 21 bp, Zea mays
agggtctgtttggttcgctgc

SEQ ID NO: 866 - DNA, 21 bp, Zea mays
acgggtgagttcgcctgtcga

SEQ ID NO: 867 - DNA, 21 bp, Zea mays
gcctgtttggttcgtggttaa

SEQ ID NO: 868 - DNA, 21 bp, Zea mays
agtccctagaaaccaaacacg

SEQ ID NO: 869 - DNA, 21 bp, Zea mays
agccgcagcgaacaagccgtg

SEQ ID NO: 870 - DNA, 21 bp, Zea mays
gtgtgacattgcagcgtggac

SEQ ID NO: 871 - DNA, 21 bp, Zea mays
ggagtggctgtctgcgggatt

SEQ ID NO: 872 - DNA, 21 bp, Zea mays
attgctgctgcgggtgattgt

SEQ ID NO: 873 - DNA, 21 bp, Zea mays
cctccggttttgtggcttcta

SEQ ID NO: 874 - DNA, 21 bp, Zea mays
acacaaacgaacaaggcctga

SEQ ID NO: 875 - DNA, 21 bp, Zea mays
aaactttagcaggagcaacca

SEQ ID NO: 876 - DNA, 21 bp, Zea mays
atgtttggtttgtggctaaat

SEQ ID NO: 877 - DNA, 21 bp, Zea mays
gagcacgcgtgaagcccgatg

SEQ ID NO: 878 - DNA, 21 bp, Zea mays
acgagccgagtcgagccacca

SEQ ID NO: 879 - DNA, 21 bp, Zea mays
gccggatcggaggatgtcatg

SEQ ID NO: 880 - DNA, 21 bp, Zea mays
agggctgatttggtgactagg

SEQ ID NO: 881 - DNA, 21 bp, Zea mays
tgtttggttgcgagacagcca

SEQ ID NO: 882 - DNA, 21 bp, Zea mays
gttgcaatgacaggacgggac

SEQ ID NO: 883 - DNA, 21 bp, Zea mays
cactatgtgtcgtgccgggcc

SEQ ID NO: 884 - DNA, 21 bp, Zea mays
tcgtatctggtgagcctggcc

SEQ ID NO: 885 - DNA, 21 bp, Zea mays
cgcatctccagagccaggctc

SEQ ID NO: 886 - DNA, 21 bp, Zea mays
gagtcatgttggctagagggt

SEQ ID NO: 887 - DNA, 21 bp, Zea mays
cggcggctacaccggcggcta

SEQ ID NO: 888 - DNA, 21 bp, Zea mays
cggctgcggctgcggctggta

SEQ ID NO: 889 - DNA, 21 bp, Zea mays
acaaaccaaacaagccctagg

SEQ ID NO: 890 - DNA, 21 bp, Zea mays
gcaccaagatctgtggcgcct

SEQ ID NO: 891 - DNA, 21 bp, Zea mays
cagcagaaacaaacgagccct

SEQ ID NO: 892 - DNA, 21 bp, Zea mays
aggcaggcaggcaggcagcgt

SEQ ID NO: 893 - DNA, 21 bp, Zea mays
agactgtcttcagcggttgcc

SEQ ID NO: 894 - DNA, 21 bp, Zea mays
tccttgcgcacaagatacgtt

SEQ ID NO: 895 - DNA, 21 bp, Zea mays
atgtttggtttgtggctaatt

SEQ ID NO: 896 - DNA, 21 bp, Zea mays
acgcttgatgtgacccgggct

SEQ ID NO: 897 - DNA, 21 bp, Zea mays
gaagatcgtgtggctggcaag

SEQ ID NO: 898 - DNA, 21 bp, Zea mays
cacgggtacgggtttgggata

SEQ ID NO: 899 - DNA, 21 bp, Zea mays
gggctgactggtgttgggcct

SEQ ID NO: 900 - DNA, 21 bp, Zea mays
gcgacatacgcagggcagccg

SEQ ID NO: 901 - DNA, 21 bp, Zea mays
gcgtagcattgggcgtgtgtg

SEQ ID NO: 902 - DNA, 21 bp, Zea mays
gccataggctgtggcgccgag

SEQ ID NO: 903 - DNA, 21 bp, Zea mays
gtatctcgggagccaggccca

SEQ ID NO: 904 - DNA, 21 bp, Zea mays
gttcgtttccgtcggattgta

SEQ ID NO: 905 - DNA, 21 bp, Zea mays
gtaaccgtggacgtaacaggg

SEQ ID NO: 906 - DNA, 21 bp, Zea mays
agaggtgacgtagaggaggac

SEQ ID NO: 907 - DNA, 21 bp, Zea mays
cttgcacgcttgcacataagg

SEQ ID NO: 908 - DNA, 21 bp, Zea mays
gggggtgtttggtttctaggt

SEQ ID NO: 909 - DNA, 21 bp, Zea mays
gaaccaaacaggcccatatat

SEQ ID NO: 910 - DNA, 21 bp, Zea mays
gcggcttgctgcggctttaat

SEQ ID NO: 911 - DNA, 21 bp, Zea mays
ccagcaggccatgtaaacgtc

SEQ ID NO: 912 - DNA, 21 bp, Zea mays
ttagccacgaaccaaacagtc

SEQ ID NO: 913 - DNA, 21 bp, Zea mays
acacaaacgaacaaggcacta

SEQ ID NO: 914 - DNA, 21 bp, Zea mays
gccgcagcggtgtcccctggc

SEQ ID NO: 915 - DNA, 21 bp, Zea mays
agtccctagaaaccaaacgac

SEQ ID NO: 916 - DNA, 21 bp, Zea mays
cgttcctgagcaaccgaacag

SEQ ID NO: 917 - DNA, 21 bp, Zea mays
agatcgtgtttggagcgagct

SEQ ID NO: 918 - DNA, 21 bp, Zea mays
  unsure (21): n = A, C, G or T
cgccataggctatggcgccgn

SEQ ID NO: 919 - DNA, 21 bp, Zea mays
caaagtaggatgagtcggggg

SEQ ID NO: 920 - DNA, 21 bp, Zea mays
gaaccaaacagcacgctagtg

SEQ ID NO: 921 - DNA, 21 bp, Zea mays
aaccgaacaagccctaatggg

SEQ ID NO: 922 - DNA, 21 bp, Zea mays
ttggtgtaaccgaacatggcc

SEQ ID NO: 923 - DNA, 21 bp, Zea mays
tgagctcgctcgactcgtggc

SEQ ID NO: 924 - DNA, 21 bp, Zea mays
tgtttggttgcgagacagtca

SEQ ID NO: 925 - DNA, 21 bp, Zea mays
gaagcacgataggcttgctcc

SEQ ID NO: 926 - DNA, 21 bp, Zea mays
gagccacaaaaccggagagga

SEQ ID NO: 927 - DNA, 21 bp, Zea mays
cccgagggggatcgaactcgg

SEQ ID NO: 928 - DNA, 21 bp, Zea mays
tgcccgtgcgttgcaacggga

SEQ ID NO: 929 - DNA, 21 bp, Zea mays
agtccctagaaaccaaatacc

SEQ ID NO: 930 - DNA, 21 bp, Zea mays
tctaggctttgccgagtgctt

SEQ ID NO: 931 - DNA, 21 bp, Zea mays
ctgccgcaggcttggttccta

SEQ ID NO: 932 - DNA, 21 bp, Zea mays
gcctcgctgggttgctcggcg

SEQ ID NO: 933 - DNA, 21 bp, Zea mays
gaagcccagggctcccgttat

SEQ ID NO: 934 - DNA, 21 bp, Zea mays
tgccgccggagcgctccagga

SEQ ID NO: 935 - DNA, 21 bp, Zea mays
aagtcaaacacttgatgtgac

SEQ ID NO: 936 - DNA, 21 bp, Zea mays
gagggctagtttgggagcaat

SEQ ID NO: 937 - DNA, 21 bp, Zea mays
gcaatccggtcaggaatcgtt

SEQ ID NO: 938 - DNA, 21 bp, Zea mays
ggtaccgtcgaacttaaggtt

SEQ ID NO: 939 - DNA, 21 bp, Zea mays
ggaggggattggaggggttag

SEQ ID NO: 940 - DNA, 21 bp, Zea mays
agcggtccgctacgaaggggg

SEQ ID NO: 941 - DNA, 21 bp, Zea mays
acggtagtgttgagcgccttg

SEQ ID NO: 942 - DNA, 21 bp, Zea mays
acggcgaggtggactaactgc

SEQ ID NO: 943 - DNA, 21 bp, Zea mays
ttggtgtaaccgaacatgccc

SEQ ID NO: 944 - DNA, 21 bp, Zea mays
ttggtgtaaccgaacaagtcc

SEQ ID NO: 945 - DNA, 21 bp, Zea mays
catagacggagtggtagggga

SEQ ID NO: 946 - DNA, 21 bp, Zea mays
cagtcgggtgggccgcttcaa

SEQ ID NO: 947 - DNA, 21 bp, Zea mays
agtcagccgtaggaagttagc

SEQ ID NO: 948 - DNA, 21 bp, Zea mays
tggggcgacgactcggctagc

SEQ ID NO: 949 - DNA, 21 bp, Zea mays
acacaaacgaacaaggcttaa

SEQ ID NO: 950 - DNA, 21 bp, Zea mays
ggggctttgccgagtgtcaaa

SEQ ID NO: 951 - DNA, 21 bp, Zea mays
aggctcacgggccgtgcctgg

SEQ ID NO: 952 - DNA, 21 bp, Zea mays
attcatcagtccagcaggctt

SEQ ID NO: 953 - DNA, 21 bp, Zea mays
acttttggtgtttggttcgct

SEQ ID NO: 954 - DNA, 21 bp, Zea mays
gagggctagtttgggagccat

SEQ ID NO: 955 - DNA, 21 bp, Zea mays
tttttgacactcggcaaaaaa

SEQ ID NO: 956 - DNA, 21 bp, Zea mays
ttagccacgaaccaaacggcc

SEQ ID NO: 957 - DNA, 21 bp, Zea mays
gtcgggattccttccaggcgg

SEQ ID NO: 958 - DNA, 21 bp, Zea mays
cacgttgctgccaaactagcc

SEQ ID NO: 959 - DNA, 21 bp, Zea mays
ctccagcaacgtcctctaaac

SEQ ID NO: 960 - DNA, 21 bp, Zea mays
cttgcatgtttgtgggggccc

SEQ ID NO: 961 - DNA, 21 bp, Zea mays
gccgccgccatcgtcgttatg

SEQ ID NO: 962 - DNA, 21 bp, Zea mays
cggccaaagccgtcggacata

SEQ ID NO: 963 - DNA, 21 bp, Zea mays
gcctcgctgggttgctcgacg

SEQ ID NO: 964 - DNA, 21 bp, Zea mays
gaaaaccgacgggaataagcc

SEQ ID NO: 965 - DNA, 21 bp, Zea mays
gagtcggtacaggaaaccaaa

SEQ ID NO: 966 - DNA, 21 bp, Zea mays
agtgtgacactcggcaaagag

SEQ ID NO: 967 - DNA, 21 bp, Zea mays
aagggctgatttggtgatccg

SEQ ID NO: 968 - DNA, 21 bp, Zea mays
gctctgtttggcacagcttat

SEQ ID NO: 969 - DNA, 21 bp, Zea mays
gtccatcgggtgacggatatg

SEQ ID NO: 970 - DNA, 21 bp, Zea mays
cagactgtttgcagcccctca

SEQ ID NO: 971 - DNA, 21 bp, Zea mays
tgtgaggggctgcaaacagtc

SEQ ID NO: 972 - DNA, 21 bp, Zea mays
tgcagaaaccgtcggcccagg

SEQ ID NO: 973 - DNA, 21 bp, Zea mays
attctcgtcgcgcggcttcac

SEQ ID NO: 974 - DNA, 21 bp, Zea mays
gagccacaaaaccggagagaa

SEQ ID NO: 975 - DNA, 21 bp, Zea mays
gccgtgcttgggcctgagtcg

SEQ ID NO: 976 - DNA, 21 bp, Zea mays
tctctcagcggcaggctggtg

SEQ ID NO: 977 - DNA, 21 bp, Zea mays
cgtgtccagcgagacgacagg

SEQ ID NO: 978 - DNA, 21 bp, Zea mays
cgtgccgtgcttgggccagca

SEQ ID NO: 979 - DNA, 21 bp, Zea mays
cgtgcaaggactagcagaagc

SEQ ID NO: 980 - DNA, 21 bp, Zea mays
cgggcactcggcaaagaagct

SEQ ID NO: 981 - DNA, 21 bp, Zea mays
ccgagactcggagagggcgtc

SEQ ID NO: 982 - DNA, 21 bp, Zea mays
tgcgcctagagaaggcccact

SEQ ID NO: 983 - DNA, 21 bp, Zea mays
gtgccgtgcctgggccagcac

SEQ ID NO: 984 - DNA, 21 bp, Zea mays
tggcccaggcacggcacgcag

SEQ ID NO: 985 - DNA, 21 bp, Zea mays
gggggtgtttggtttctaaag

SEQ ID NO: 986 - DNA, 21 bp, Zea mays
agtccctagaaaccaaacgcc

SEQ ID NO: 987 - DNA, 21 bp, Zea mays
gggcgcatgacagctattgca

SEQ ID NO: 988 - DNA, 21 bp, Zea mays
aaaacaccttccaacagggca

SEQ ID NO: 989 - DNA, 21 bp, Zea mays
ccagcggcccagccacgattg

SEQ ID NO: 990 - DNA, 21 bp, Zea mays
ccggtgcgcccatcgccacca

SEQ ID NO: 991 - DNA, 21 bp, Zea mays
agggactgcactgcgtacata

SEQ ID NO: 992 - DNA, 21 bp, Zea mays
tcggctcggctcggatcggat

SEQ ID NO: 993 - DNA, 21 bp, Zea mays
ccctaatcaccaaatcagtca

SEQ ID NO: 994 - DNA, 21 bp, Zea mays
tcggtctattcgggttctcga

SEQ ID NO: 995 - DNA, 21 bp, Zea mays
agggctgatttggtgaccagg

SEQ ID NO: 996 - DNA, 21 bp, Zea mays
aggcaggcaggcaggcagtga

SEQ ID NO: 997 - DNA, 21 bp, Zea mays
tccctccctccctcccttaaa

SEQ ID NO: 998 - DNA, 21 bp, Zea mays
ccgcgcagccagctactgcgc

SEQ ID NO: 999 - DNA, 21 bp, Zea mays
cccatgtgagaacgaccgcga

SEQ ID NO: 1000 - DNA, 21 bp, Zea mays
ccataaaccgagcaagccaac

SEQ ID NO: 1001 - DNA, 21 bp, Zea mays
agtccctagaaaccaaacata

SEQ ID NO: 1002 - DNA, 21 bp, Zea mays
tgcccgtgcgttgcaacggaa

SEQ ID NO: 1003 - DNA, 21 bp, Zea mays
agcaacgccgtgtatgtggat

SEQ ID NO: 1004 - DNA, 21 bp, Zea mays
actattggagttgctcttagc

SEQ ID NO: 1005 - DNA, 21 bp, Zea mays
aagggctgatttggtgaccat

SEQ ID NO: 1006 - DNA, 21 bp, Zea mays
agggctgatttggtgaccaga

SEQ ID NO: 1007 - DNA, 21 bp, Zea mays
ttagccacgaaccaaacagac

SEQ ID NO: 1008 - DNA, 21 bp, Zea mays
tggtgcacggttctgcctgca

SEQ ID NO: 1009 - DNA, 21 bp, Zea mays
ctcgcgagctaaacgagccaa

SEQ ID NO: 1010 - DNA, 21 bp, Zea mays
gaggcccaaacacgacccgct

SEQ ID NO: 1011 - DNA, 21 bp, Zea mays
cgtgccaaccagactgcctcg

SEQ ID NO: 1012 - DNA, 21 bp, Zea mays
gcagcggctgctggctcccgc

SEQ ID NO: 1013 - DNA, 21 bp, Zea mays
ggggattttctcggccgagac

SEQ ID NO: 1014 - DNA, 21 bp, Zea mays
ctgaagacccctgcgaaagga

SEQ ID NO: 1015 - DNA, 21 bp, Zea mays
cgggttcaggtgcgggtttag

SEQ ID NO: 1016 - DNA, 21 bp, Zea mays
gcacgcaggcgcacttgtcac

SEQ ID NO: 1017 - DNA, 21 bp, Zea mays
caaccaaacgcaccctaagta

SEQ ID NO: 1018 - DNA, 21 bp, Zea mays
atgtttggtttgtggctaaca

SEQ ID NO: 1019 - DNA, 21 bp, Zea mays
caggcactcggcaaagaagat

SEQ ID NO: 1020 - DNA, 21 bp, Zea mays
cgcagcaccattggatgtgga

SEQ ID NO: 1021 - DNA, 21 bp, Zea mays
cttgactggctcgtcttattc

SEQ ID NO: 1022 - DNA, 21 bp, Zea mays
tcggttttgctggtgtgctca

SEQ ID NO: 1023 - DNA, 21 bp, Zea mays
aggcaagccccggtgcatgca

SEQ ID NO: 1024 - DNA, 21 bp, Zea mays
caccggacagcacagagacgg

SEQ ID NO: 1025 - DNA, 21 bp, Zea mays
aagggctgatttggtgattag

SEQ ID NO: 1026 - DNA, 21 bp, Zea mays
agggggaaccgctgcgggaga

SEQ ID NO: 1027 - DNA, 21 bp, Zea mays
cgaacagggccttagggcgtg

SEQ ID NO: 1028 - DNA, 21 bp, Zea mays
gtattgccgaagccactggta

SEQ ID NO: 1029 - DNA, 21 bp, Zea mays
actcgacaaagcgtactgtgc

SEQ ID NO: 1030 - DNA, 21 bp, Zea mays
aggcaaagtgtgacaagttat

SEQ ID NO: 1031 - DNA, 21 bp, Zea mays
gctaatcgtgccgtgcccgtg

SEQ ID NO: 1032 - DNA, 21 bp, Zea mays
gcccgctgggttggggaagac

SEQ ID NO: 1033 - DNA, 21 bp, Zea mays
gcttatgtccgacggtctcct

SEQ ID NO: 1034 - DNA, 21 bp, Zea mays
gtgcccgtgcgttgcgacgga

SEQ ID NO: 1035 - DNA, 21 bp, Zea mays
gttgcaacgcacggacactca

SEQ ID NO: 1036 - DNA, 21 bp, Zea mays
agggctgggaagacactcgca

SEQ ID NO: 1037 - DNA, 21 bp, Zea mays
cagtttcaacggtcgtcacac

SEQ ID NO: 1038 - DNA, 21 bp, Zea mays
agcggcggcggcggcttcgcg

SEQ ID NO: 1039 - DNA, 21 bp, Zea mays
gttgcgggacagccaggacag

SEQ ID NO: 1040 - DNA, 21 bp, Zea mays
agtccctagaaaccaaacagc

SEQ ID NO: 1041 - DNA, 21 bp, Zea mays
gggcctgtttggtttgtgtca

SEQ ID NO: 1042 - DNA, 21 bp, Zea mays
tggaacgattccggttgcaat

SEQ ID NO: 1043 - DNA, 21 bp, Zea mays
gtcgcgtggtccgtgtgcgtc

SEQ ID NO: 1044 - DNA, 21 bp, Zea mays
tggtttgcatccgggctgcac

SEQ ID NO: 1045 - DNA, 21 bp, Zea mays
ggtgttgcgacaccgtctatt

SEQ ID NO: 1046 - DNA, 21 bp, Zea mays
aggcaggcaggcaggcagagc

SEQ ID NO: 1047 - DNA, 21 bp, Zea mays
cgtcgtgccgacccatttatc

SEQ ID NO: 1048 - DNA, 21 bp, Zea mays
gagggctagtttgggaggctc

SEQ ID NO: 1049 - DNA, 21 bp, Zea mays
cgtgagttctccgctgctttc

SEQ ID NO: 1050 - DNA, 21 bp, Zea mays
ctccagcaacgtcctctatat

SEQ ID NO: 1051 - DNA, 21 bp, Zea mays
agtagcaacagacgtcttatt

SEQ ID NO: 1052 - DNA, 21 bp, Zea mays
cgcttggggtcgacttggctt

SEQ ID NO: 1053 - DNA, 21 bp, Zea mays
acgcttgatgtgacccggact

SEQ ID NO: 1054 - DNA, 21 bp, Zea mays
agggtctgtttggttcgctga

SEQ ID NO: 1055 - DNA, 21 bp, Zea mays
ctggtttgctgcctaaggtgc

SEQ ID NO: 1056 - DNA, 21 bp, Zea mays
gagggtgcgaatgttgcgcct

SEQ ID NO: 1057 - DNA, 21 bp, Zea mays
tgaaccaaacaggccctatat

SEQ ID NO: 1058 - DNA, 21 bp, Zea mays
cgtgcctgagccagagttgtg

SEQ ID NO: 1059 - DNA, 21 bp, Zea mays
agaggctgttcaccttggaga

SEQ ID NO: 1060 - DNA, 21 bp, Zea mays
tgcccgtgcgttgcaacgggg

SEQ ID NO: 1061 - DNA, 21 bp, Zea mays
gtggtcgcgggcgggtttggg

SEQ ID NO: 1062 - DNA, 21 bp, Zea mays
gagggtgcgaatgttgcggct

SEQ ID NO: 1063 - DNA, 21 bp, Zea mays
gtcctatggaaccaaacatat

SEQ ID NO: 1064 - DNA, 21 bp, Zea mays
agctcggcgccaagatctatg

SEQ ID NO: 1065 - DNA, 21 bp, Zea mays
tgcggctgcaatccggctgtg

SEQ ID NO: 1066 - DNA, 21 bp, Zea mays
caacgtacggacactcaccta

SEQ ID NO: 1067 - DNA, 21 bp, Zea mays
ggtgcaagcatgcaatcaaac

SEQ ID NO: 1068 - DNA, 21 bp, Zea mays
accgaccgaccgaccgacctg

SEQ ID NO: 1069 - DNA, 21 bp, Zea mays
cagtccacagaagcagccagg

SEQ ID NO: 1070 - DNA, 21 bp, Zea mays
actcggcggcgattgacttgg

SEQ ID NO: 1071 - DNA, 21 bp, Zea mays
gtagcaacgcacgggcatata

SEQ ID NO: 1072 - DNA, 21 bp, Zea mays
tttttgacactcggcaaaact

SEQ ID NO: 1073 - DNA, 21 bp, Zea mays
cagacgccacaccgcgccaca

SEQ ID NO: 1074 - DNA, 21 bp, Zea mays
gagccgagccgagctgagctg

SEQ ID NO: 1075 - DNA, 21 bp, Zea mays
gtcttcgcacggatcgaccgg

SEQ ID NO: 1076 - DNA, 21 bp, Zea mays
cccaaggcgtccagcaccgtg

SEQ ID NO: 1077 - DNA, 21 bp, Zea mays
ctccacgctctacagcggttc

SEQ ID NO: 1078 - DNA, 21 bp, Zea mays
acgctgacgtggcacgtgagt

SEQ ID NO: 1079 - DNA, 21 bp, Zea mays
ctgatttggtgaccaggaatc

SEQ ID NO: 1080 - DNA, 21 bp, Zea mays
tggctcccgctgcccgccggt

SEQ ID NO: 1081 - DNA, 21 bp, Zea mays
ggtgcaagcatgcaatcaatc

SEQ ID NO: 1082 - DNA, 21 bp, Zea mays
gggggtgtttggtttctagtt

SEQ ID NO: 1083 - DNA, 21 bp, Zea mays
acaaaccaaacaagccctatg

SEQ ID NO: 1084 - DNA, 21 bp, Zea mays
aggtgattttagcccctctaa

SEQ ID NO: 1085 - DNA, 21 bp, Zea mays
caatcccctccggttttctcg

SEQ ID NO: 1086 - DNA, 21 bp, Zea mays
aagggctgatttggtgacaaa

SEQ ID NO: 1087 - DNA, 21 bp, Zea mays
acacaaacgaacaaggcctca

SEQ ID NO: 1088 - DNA, 21 bp, Zea mays
gcttatgtccgacggtcctgt

SEQ ID NO: 1089 - DNA, 21 bp, Zea mays
gaggccgtcggaggtaagggg

SEQ ID NO: 1090 - DNA, 21 bp, Zea mays
attggatgcctgctgctcggc

SEQ ID NO: 1091 - DNA, 21 bp, Zea mays
gtggaggcaggaagacgagca

SEQ ID NO: 1092 - DNA, 21 bp, Zea mays
gttcttgggggccgattggcg

SEQ ID NO: 1093 - DNA, 21 bp, Zea mays
agcacggcccagcccgcgatt

SEQ ID NO: 1094 - DNA, 21 bp, Zea mays
aaagcacggcccgacacggct

SEQ ID NO: 1095 - DNA, 21 bp, Zea mays
ggtgcacggttctgcctatag

SEQ ID NO: 1096 - DNA, 21 bp, Zea mays
ttgctccggcacgaggacgta

SEQ ID NO: 1097 - DNA, 21 bp, Zea mays
accccatccgctctcgggttg

SEQ ID NO: 1098 - DNA, 21 bp, Zea mays
gaaccaaacaggcccatagtc

SEQ ID NO: 1099 - DNA, 21 bp, Zea mays
tgggcctgtttggttcgtgcc

SEQ ID NO: 1100 - DNA, 21 bp, Zea mays
cgatccggaggagacgaggcc

SEQ ID NO: 1101 - DNA, 21 bp, Zea mays
gcccgcccgcccgcccgaggc

SEQ ID NO: 1102 - DNA, 21 bp, Zea mays
tttgcaagggggatgctgccg

SEQ ID NO: 1103 - DNA, 21 bp, Zea mays
ggaacgattccgggtgcagtc

SEQ ID NO: 1104 - DNA, 21 bp, Zea mays
caaatcccaacagcaccaaga

SEQ ID NO: 1105 - DNA, 21 bp, Zea mays
agctcggctcggctcgctttg

SEQ ID NO: 1106 - DNA, 21 bp, Zea mays
tggctggctggctggctccgg

SEQ ID NO: 1107 - DNA, 21 bp, Zea mays
ggagctatcccaaacaggacc

SEQ ID NO: 1108 - DNA, 21 bp, Zea mays
gtgcgttcggttaagccctga

SEQ ID NO: 1109 - DNA, 21 bp, Zea mays
ctctttgccgagtgccagggc

SEQ ID NO: 1110 - DNA, 21 bp, Zea mays
tgcccgtgcgttgcaacggag

SEQ ID NO: 1111 - DNA, 21 bp, Zea mays
tcggcggcgaggtactcaagc

SEQ ID NO: 1112 - DNA, 21 bp, Zea mays
gctgcgatgctcgtgcaccga

SEQ ID NO: 1113 - DNA, 21 bp, Zea mays
ttgcaacgcacgggcactaac

SEQ ID NO: 1114 - DNA, 21 bp, Zea mays
cggagctaaggaacggtggct

SEQ ID NO: 1115 - DNA, 21 bp, Zea mays
cgtgccgtgccggcactatac

SEQ ID NO: 1116 - DNA, 21 bp, Zea mays
tgtgaggggctgcaaacagag

SEQ ID NO: 1117 - DNA, 21 bp, Zea mays
ttggttgcaatgacaggacgg

SEQ ID NO: 1118 - DNA, 21 bp, Zea mays
cgggtgaagcggccacatcga

SEQ ID NO: 1119 - DNA, 21 bp, Zea mays
caccccccccccccccccctt

SEQ ID NO: 1120 - DNA, 21 bp, Zea mays
gtccagtacggttgctccact

SEQ ID NO: 1121 - DNA, 21 bp, Zea mays
ggtaccgtcgaacttaatgtt

SEQ ID NO: 1122 - DNA, 21 bp, Zea mays
ggcactcggcaaagaagcatc

SEQ ID NO: 1123 - DNA, 21 bp, Zea mays
acagcactcggcaaagaattt

SEQ ID NO: 1124 - DNA, 21 bp, Zea mays
ggagctatcccaaacagggcc

SEQ ID NO: 1125 - DNA, 21 bp, Zea mays
ttggttgcaatgacaggacga

SEQ ID NO: 1126 - DNA, 21 bp, Zea mays
ttagccacgaaccaaacactg

SEQ ID NO: 1127 - DNA, 21 bp, Zea mays
caggaaccgccgaaaataggc

SEQ ID NO: 1128 - DNA, 21 bp, Zea mays
ggtcgcttggaggctaagtct

SEQ ID NO: 1129 - DNA, 21 bp, Zea mays
tgaaccaaacaggccctaaag

SEQ ID NO: 1130 - DNA, 21 bp, Zea mays
acacaaacgaacaaggccaga

SEQ ID NO: 1131 - DNA, 21 bp, Zea mays
aggctaatccaacagactctg

SEQ ID NO: 1132 - DNA, 21 bp, Zea mays
ccacccacccacccaccccca

SEQ ID NO: 1133 - DNA, 21 bp, Zea mays
tcggcaaagagccaaatttcg

SEQ ID NO: 1134 - DNA, 21 bp, Zea mays
aggcaggcaggcaggcacgct

SEQ ID NO: 1135 - DNA, 21 bp, Zea mays
ggaggggattggaggggctgg

SEQ ID NO: 1136 - DNA, 21 bp, Zea mays
caggccttgttcgtttgtgcc

SEQ ID NO: 1137 - DNA, 21 bp, Zea mays
agggctgatttggtgaccatg

SEQ ID NO: 1138 - DNA, 21 bp, Zea mays
gctgcatccacacgtacgtct

SEQ ID NO: 1139 - DNA, 21 bp, Zea mays
cgtgccgtgcttgggccgtgc

SEQ ID NO: 1140 - DNA, 21 bp, Zea mays
cctgtttggttcgtggctaat

SEQ ID NO: 1141 - DNA, 21 bp, Zea mays
agactgtcttcagcggttccc

SEQ ID NO: 1142 - DNA, 21 bp, Zea mays
gcggcagtgccctctcccacg

SEQ ID NO: 1143 - DNA, 21 bp, Zea mays
cgaacccctgccccacccata

SEQ ID NO: 1144 - DNA, 21 bp, Zea mays
cccatgtgagaacgaccacga

SEQ ID NO: 1145 - DNA, 21 bp, Zea mays
cgaaccgcctgtgatgtaaaa

SEQ ID NO: 1146 - DNA, 21 bp, Zea mays
catcacaggcggttcggttag

SEQ ID NO: 1147 - DNA, 21 bp, Zea mays
aggcggtgaccgaggaggcgc

SEQ ID NO: 1148 - DNA, 21 bp, Zea mays
aggtgagtgcccgtgcgtcac

SEQ ID NO: 1149 - DNA, 21 bp, Zea mays
gctaacaggctggcccgacac

SEQ ID NO: 1150 - DNA, 21 bp, Zea mays
ggcctacgggccgagcctaca

SEQ ID NO: 1151 - DNA, 21 bp, Zea mays
gcccgtgcgttgcgacgacac

SEQ ID NO: 1152 - DNA, 21 bp, Zea mays
aggctggctggctgcgtggcc

SEQ ID NO: 1153 - DNA, 21 bp, Zea mays
aaaaagcactcggcaaagaag

SEQ ID NO: 1154 - DNA, 21 bp, Zea mays
agggctgatttggtgacaaga

SEQ ID NO: 1155 - DNA, 21 bp, Zea mays
gcagacaacgacgacggcgtc

SEQ ID NO: 1156 - DNA, 21 bp, Zea mays
aacccagcctgagcacgacta

SEQ ID NO: 1157 - DNA, 21 bp, Zea mays
aagatccgatcagatatgtgt

SEQ ID NO: 1158 - DNA, 21 bp, Zea mays
aaaaagacagtggtagtatag

SEQ ID NO: 1159 - DNA, 21 bp, Zea mays
ctagttttgcaactctttttt

SEQ ID NO: 1160 - DNA, 21 bp, Zea mays
actctagtattgaagtggttt

SEQ ID NO: 1161 - DNA, 21 bp, Zea mays
aaaggtcaaactaattataaa

SEQ ID NO: 1162 - DNA, 21 bp, Zea mays
gtggacttcgcgcaggattta

SEQ ID NO: 1163 - DNA, 21 bp, Zea mays
ggatctggtttcgactaattt

SEQ ID NO: 1164 - DNA, 21 bp, Zea mays
gtcaggattcattccagctca

SEQ ID NO: 1165 - DNA, 21 bp, Zea mays
acctgtgatgtgtgactatca

SEQ ID NO: 1166 - DNA, 21 bp, Zea mays
ggaacgattcctaaccggatt

SEQ ID NO: 1167 - DNA, 21 bp, Zea mays
gttgtcggctggttgcgcccg

SEQ ID NO: 1168 - DNA, 21 bp, Zea mays
tttttggctcatgccctctag

SEQ ID NO: 1169 - DNA, 21 bp, Zea mays
cactccatattttgatctatc

SEQ ID NO: 1170 - DNA, 21 bp, Zea mays
gtccagcactgacttcgacac

SEQ ID NO: 1171 - DNA, 21 bp, Zea mays
gtggacttcgcgcaggatttg

SEQ ID NO: 1172 - DNA, 21 bp, Zea mays
gtggacttcgcgcaggatctg

SEQ ID NO: 1173 - DNA, 21 bp, Zea mays
aactttgcactatatatagag

SEQ ID NO: 1174 - DNA, 21 bp, Zea mays
tcggcaagtcatccttggctg

SEQ ID NO: 1175 - DNA, 21 bp, Zea mays
gctataggctatggcgtcgaa

SEQ ID NO: 1176 - DNA, 21 bp, Zea mays
ctaactactagttctagtgca

SEQ ID NO: 1177 - DNA, 21 bp, Zea mays
cactccatattttgatctata

SEQ ID NO: 1178 - DNA, 21 bp, Zea mays
ggagatattgacgcggctcaa

SEQ ID NO: 1179 - DNA, 21 bp, Zea mays
ttgagccgcgtcaatatctcc

SEQ ID NO: 1180 - DNA, 21 bp, Zea mays
gaactaaccttaggcacaaaa

SEQ ID NO: 1181 - DNA, 21 bp, Zea mays
gtttatgtcgctgatttgtcc

SEQ ID NO: 1182 - DNA, 21 bp, Zea mays
ccgctacatttggagggtaga

SEQ ID NO: 1183 - DNA, 21 bp, Zea mays
gtggacttcgcgcaggattgg

SEQ ID NO: 1184 - DNA, 21 bp, Zea mays
atcttcttgcgcctctactgc

SEQ ID NO: 1185 - DNA, 21 bp, Zea mays
aagatcacatcaatcccttgg

SEQ ID NO: 1186 - DNA, 21 bp, Zea mays
ttgttgtgcttagtccggctg

SEQ ID NO: 1187 - DNA, 21 bp, Zea mays
agctaagcctgcgcgtggtgc

SEQ ID NO: 1188 - DNA, 21 bp, Zea mays
acaattggtcatcgcgcttgg

SEQ ID NO: 1189 - DNA, 21 bp, Zea mays
tctcttgcccttctcggactg

SEQ ID NO: 1190 - DNA, 21 bp, Zea mays
gatatagggttgggcctctga

SEQ ID NO: 1191 - DNA, 21 bp, Zea mays
ggaaatagcattatgtccgac

SEQ ID NO: 1192 - DNA, 21 bp, Zea mays
gtggacgcctataccatagcc

SEQ ID NO: 1193 - DNA, 21 bp, Zea mays
gatatagggttgggcctctgg

SEQ ID NO: 1194 - DNA, 21 bp, Zea mays
acggtcctctaaatttagagg

SEQ ID NO: 1195 - DNA, 21 bp, Zea mays
ccgcattcgtgcgtgaggtgg

SEQ ID NO: 1196 - DNA, 21 bp, Zea mays
aaacggttctctatctatttg

SEQ ID NO: 1197 - DNA, 21 bp, Zea mays
gaatccttgccgtgttcgcgg

SEQ ID NO: 1198 - DNA, 21 bp, Zea mays
aaaagtcaaacgcttgatgtg

SEQ ID NO: 1199 - DNA, 21 bp, Zea mays
ggcatgtcgctcgcccagatg

SEQ ID NO: 1200 - DNA, 21 bp, Zea mays
ggcatgtcgctcgcccagatc

SEQ ID NO: 1201 - DNA, 21 bp, Zea mays
ggcatgtcgctcgcccagatt

SEQ ID NO: 1202 - DNA, 21 bp, Zea mays
cacgagcccggcacgaaataa

SEQ ID NO: 1203 - DNA, 21 bp, Zea mays
ccgatgctcggcgccataggc

SEQ ID NO: 1204 - DNA, 21 bp, Zea mays
cctaagtcacgcctcaggggc

SEQ ID NO: 1205 - DNA, 21 bp, Zea mays
atgttcctacactatgtagac

SEQ ID NO: 1206 - DNA, 21 bp, Zea mays
gtagttgatagccaaggtcgc

SEQ ID NO: 1207 - DNA, 21 bp, Zea mays
aaaggcactcggcaaagtata

SEQ ID NO: 1208 - DNA, 21 bp, Zea mays
gtaagccagcgggcggagtct

SEQ ID NO: 1209 - DNA, 21 bp, Zea mays
ctcggcaaagaacctaacatg

SEQ ID NO: 1210 - DNA, 21 bp, Zea mays
tgagcctgtaagcgctggggg

SEQ ID NO: 1211 - DNA, 21 bp, Zea mays
ccacatcggctgccacgtagg

SEQ ID NO: 1212 - DNA, 21 bp, Zea mays
cagtctttgccgagtgccaac

SEQ ID NO: 1213 - DNA, 21 bp, Zea mays
acagactttgccgagtgccaa

SEQ ID NO: 1214 - DNA, 21 bp, Zea mays
ttagctggaacgattccgagt

SEQ ID NO: 1215 - DNA, 21 bp, Zea mays
cgacgacgaagggcggttgcg

SEQ ID NO: 1216 - DNA, 21 bp, Zea mays
tagggctagtttgggagccac

SEQ ID NO: 1217 - DNA, 21 bp, Zea mays
tccagaccgggctgatccacg

SEQ ID NO: 1218 - DNA, 21 bp, Zea mays
gtcattgttgtcggtcctcct

SEQ ID NO: 1219 - DNA, 21 bp, Zea mays
tgatgctgcggtagtggtccc

SEQ ID NO: 1220 - DNA, 21 bp, Zea mays
tgggcgcagtcttcgccgtgg

SEQ ID NO: 1221 - DNA, 21 bp, Zea mays
aggccgaaacgtgctcgtgga

SEQ ID NO: 1222 - DNA, 21 bp, Zea mays
caagtgctcggcgaaaggcca

SEQ ID NO: 1223 - DNA, 21 bp, Zea mays
gttgttgttgcttcttcatat

SEQ ID NO: 1224 - DNA, 21 bp, Zea mays
aaaagacccatgttggtttgt

SEQ ID NO: 1225 - DNA, 21 bp, Zea mays
gtcgaagacctcatagtgact

SEQ ID NO: 1226 - DNA, 21 bp, Zea mays
gacattttggacctggtgcgt

SEQ ID NO: 1227 - DNA, 21 bp, Zea mays
gcggacggctggcgtgccgat

SEQ ID NO: 1228 - DNA, 21 bp, Zea mays
tttgccgagtgccgccgatct

SEQ ID NO: 1229 - DNA, 21 bp, Zea mays
agggagaccgaacgggttcaa

SEQ ID NO: 1230 - DNA, 21 bp, Zea mays
aggccttgttcgtttctgtca

SEQ ID NO: 1231 - DNA, 21 bp, Zea mays
agtccgacaaggccactaaca

SEQ ID NO: 1232 - DNA, 21 bp, Zea mays
ccttgtgcaggcaaccaaata

SEQ ID NO: 1233 - DNA, 21 bp, Zea mays
cccgtgcgttgcgacgggaat

SEQ ID NO: 1234 - DNA, 21 bp, Zea mays
acgtctttgccgagtgtctcc

SEQ ID NO: 1235 - DNA, 21 bp, Zea mays
gtcgaagacctcatagtgttt

SEQ ID NO: 1236 - DNA, 21 bp, Zea mays
aggccgaagcctatcagacag

SEQ ID NO: 1237 - DNA, 21 bp, Zea mays
aaaacactcggcaaagaaact

SEQ ID NO: 1238 - DNA, 21 bp, Zea mays
aaaacactcggcaaagactct

SEQ ID NO: 1239 - DNA, 21 bp, Zea mays
ttggtttgacttcgagactgc

SEQ ID NO: 1240 - DNA, 21 bp, Zea mays
acgacagccgtcggacataat

SEQ ID NO: 1241 - DNA, 21 bp, Zea mays
ccatagcactcggcaaagaac

SEQ ID NO: 1242 - DNA, 21 bp, Zea mays
agagtgaagcaggctatccaa

SEQ ID NO: 1243 - DNA, 21 bp, Zea mays
cccggtcgtactcataaccgc

SEQ ID NO: 1244 - DNA, 21 bp, Zea mays
cgacctctttgccgagtgcct

SEQ ID NO: 1245 - DNA, 21 bp, Zea mays
caagatctatggcgccgaggt

SEQ ID NO: 1246 - DNA, 21 bp, Zea mays
tcaagatctgtggcgccgagc

SEQ ID NO: 1247 - DNA, 21 bp, Zea mays
cagtctttgccgagtgccaga

SEQ ID NO: 1248 - DNA, 21 bp, Zea mays
agctcttgctgccgactgagt

SEQ ID NO: 1249 - DNA, 21 bp, Zea mays
tggagaccgtgctgtcatcga

SEQ ID NO: 1250 - DNA, 21 bp, Zea mays
ctggcactcgacaaagaagca

SEQ ID NO: 1251 - DNA, 21 bp, Zea mays
aagatgtgaccacgacttggt

SEQ ID NO: 1252 - DNA, 21 bp, Zea mays
acccagcgggtggtccattta

SEQ ID NO: 1253 - DNA, 21 bp, Zea mays
gacgaggagttcgcgaggcag

SEQ ID NO: 1254 - DNA, 21 bp, Zea mays
aaggcggcaatcgcctcggct

SEQ ID NO: 1255 - DNA, 21 bp, Zea mays
caaagactttgccgagtgcca

SEQ ID NO: 1256 - DNA, 21 bp, Zea mays
caagcccgaaaaggcccgtct

SEQ ID NO: 1257 - DNA, 21 bp, Zea mays
cacacttttcccgccgcagtt

SEQ ID NO: 1258 - DNA, 21 bp, Zea mays
caattcgaacgactaacctta

SEQ ID NO: 1259 - DNA, 21 bp, Zea mays
aggtgcgcgcagtggagatcg

SEQ ID NO: 1260 - DNA, 21 bp, Zea mays
gcattcatgtgcattattgca

SEQ ID NO: 1261 - DNA, 21 bp, Zea mays
aggcactcggcaaagaagtta

SEQ ID NO: 1262 - DNA, 21 bp, Zea mays
tctgggttgaacggcggagat

SEQ ID NO: 1263 - DNA, 21 bp, Zea mays
tgaacacgactgagtgcaggg

SEQ ID NO: 1264 - DNA, 21 bp, Zea mays
taggatgtgtttggttggatg

SEQ ID NO: 1265 - DNA, 21 bp, Zea mays
caaggtcgaggaccctgtggt

SEQ ID NO: 1266 - DNA, 21 bp, Zea mays
gtgtacgccgcagcacgggcg

SEQ ID NO: 1267 - DNA, 21 bp, Zea mays
ccatagcactcggcaaaaaag

SEQ ID NO: 1268 - DNA, 21 bp, Zea mays
gccatagcctatgacgctgag

SEQ ID NO: 1269 - DNA, 21 bp, Zea mays
tttctttgccgagtgcccgtg

SEQ ID NO: 1270 - DNA, 21 bp, Zea mays
aggctttgccgagtgtccagc

SEQ ID NO: 1271 - DNA, 21 bp, Zea mays
gagggtcggctctgataccat

SEQ ID NO: 1272 - DNA, 21 bp, Zea mays
tggtgttaagtgccggtgggc

SEQ ID NO: 1273 - DNA, 21 bp, Zea mays
taagcttatgtccgacggcta

SEQ ID NO: 1274 - DNA, 21 bp, Zea mays
cccgtgcgttgcaacgggacc

SEQ ID NO: 1275 - DNA, 21 bp, Zea mays
cacaaacgaacaagaccttat

SEQ ID NO: 1276 - DNA, 21 bp, Zea mays
tgggcccaataacttgggagg

SEQ ID NO: 1277 - DNA, 21 bp, Zea mays
atggatcggctggtcctggca

SEQ ID NO: 1278 - DNA, 21 bp, Zea mays
ccaagatctacggcgccaagg

SEQ ID NO: 1279 - DNA, 21 bp, Zea mays
gtgtaagcctgaatgacttgt

SEQ ID NO: 1280 - DNA, 21 bp, Zea mays
agaggccgttgtcgatgatcg

SEQ ID NO: 1281 - DNA, 21 bp, Zea mays
gtgtacccgccccacgaatct

SEQ ID NO: 1282 - DNA, 21 bp, Zea mays
cccgtgcgttgcgacggctta

SEQ ID NO: 1283 - DNA, 21 bp, Zea mays
actccctcgggatgactgcac

SEQ ID NO: 1284 - DNA, 21 bp, Zea mays
gtaagccagcgggcggagcct

SEQ ID NO: 1285 - DNA, 21 bp, Zea mays
aaaagactcgtgttggtctgt

SEQ ID NO: 1286 - DNA, 21 bp, Zea mays
ccctgaagcggctcagtgcca

SEQ ID NO: 1287 - DNA, 21 bp, Zea mays
cgtattaggaacgtgggtacc

SEQ ID NO: 1288 - DNA, 21 bp, Zea mays
cggccaaaccacggcgatctg

SEQ ID NO: 1289 - DNA, 21 bp, Zea mays
ttagctggaacgattccggga

SEQ ID NO: 1290 - DNA, 21 bp, Zea mays
cacaaacgaacaagacctaag

SEQ ID NO: 1291 - DNA, 21 bp, Zea mays
cttgctgagttgctcgatagg

SEQ ID NO: 1292 - DNA, 21 bp, Zea mays
aaataagctgtgccaaacagg

SEQ ID NO: 1293 - DNA, 21 bp, Zea mays
ccacatcggctgccacgtaag

SEQ ID NO: 1294 - DNA, 21 bp, Zea mays
gcacatctacaccagcagcac

SEQ ID NO: 1295 - DNA, 21 bp, Zea mays
taggatgtgtttggttgcagg

SEQ ID NO: 1296 - DNA, 21 bp, Zea mays
cataggctatggcgccgagca

SEQ ID NO: 1297 - DNA, 21 bp, Zea mays
aggctagtttggtgtgtggcc

SEQ ID NO: 1298 - DNA, 21 bp, Zea mays
actccctcgggatgactgagt

SEQ ID NO: 1299 - DNA, 21 bp, Zea mays
tggacaggaaaatggattcat

SEQ ID NO: 1300 - DNA, 21 bp, Zea mays
gtcgaagacctcatagtgccg

SEQ ID NO: 1301 - DNA, 21 bp, Zea mays
aaggccttgttcgtttgtatc

SEQ ID NO: 1302 - DNA, 21 bp, Zea mays
ctttgccgagtgtctgcacca

SEQ ID NO: 1303 - DNA, 21 bp, Zea mays
gtgacactcggcaaagagccc

SEQ ID NO: 1304 - DNA, 21 bp, Zea mays
gttggctagagggtggaaaag

SEQ ID NO: 1305 - DNA, 21 bp, Zea mays
ttcagtgactggcactacaga

SEQ ID NO: 1306 - DNA, 21 bp, Zea mays
aaaactttgttcccaaacacc

SEQ ID NO: 1307 - DNA, 21 bp, Zea mays
gacgggaattaaaataaagcc

SEQ ID NO: 1308 - DNA, 21 bp, Zea mays
ccgtggctagtctgcgctcgg

SEQ ID NO: 1309 - DNA, 21 bp, Zea mays
gaagccgccgaaaataaccta

SEQ ID NO: 1310 - DNA, 21 bp, Zea mays
gaagccgccgaaaataaccac

SEQ ID NO: 1311 - DNA, 21 bp, Zea mays
gtcatggatgagaggagagtg

SEQ ID NO: 1312 - DNA, 21 bp, Zea mays
gtctcagacacacggcaaaga

SEQ ID NO: 1313 - DNA, 21 bp, Zea mays
gtctgagacacacggcaaagg

SEQ ID NO: 1314 - DNA, 21 bp, Zea mays
ttctttgccgagtgccatttg

SEQ ID NO: 1315 - DNA, 21 bp, Zea mays
agatcttggcggcgaacatcc

SEQ ID NO: 1316 - DNA, 21 bp, Zea mays
gttaggaacgtgggtacccat

SEQ ID NO: 1317 - DNA, 21 bp, Zea mays
acatgtcggggctcagcattc

SEQ ID NO: 1318 - DNA, 21 bp, Zea mays
aaactttggttgagaccaatt

SEQ ID NO: 1319 - DNA, 21 bp, Zea mays
ttatgtccgacggctttggtc

SEQ ID NO: 1320 - DNA, 21 bp, Zea mays
gccacactttgtctaagctta

SEQ ID NO: 1321 - DNA, 21 bp, Zea mays
ggcaaagtgtggcaagtgagg

SEQ ID NO: 1322 - DNA, 21 bp, Zea mays
cggccaaaccacggcgatggg

SEQ ID NO: 1323 - DNA, 21 bp, Zea mays
aaaggcactcggcaaagtatt

SEQ ID NO: 1324 - DNA, 21 bp, Zea mays
aaaagcactcgacaaagaaaa

SEQ ID NO: 1325 - DNA, 21 bp, Zea mays
cacaaacgaacaagacctttt

SEQ ID NO: 1326 - DNA, 21 bp, Zea mays
agaccttacttaaggcccagg

SEQ ID NO: 1327 - DNA, 21 bp, Zea mays
tagggctagtttgggagtcac

SEQ ID NO: 1328 - DNA, 21 bp, Zea mays
gaagatcgggcatcgtgacgc

SEQ ID NO: 1329 - DNA, 21 bp, Zea mays
gttcgtttctgctggaacaga

SEQ ID NO: 1330 - DNA, 21 bp, Zea mays
gtccggttagtatagtgccag

SEQ ID NO: 1331 - DNA, 21 bp, Zea mays
ccgagtgtcggcgaaatgcaa

SEQ ID NO: 1332 - DNA, 21 bp, Zea mays
cctcgaggatgctgacgcaat

SEQ ID NO: 1333 - DNA, 21 bp, Zea mays
ctgggccaattgcgtctttgc

SEQ ID NO: 1334 - DNA, 21 bp, Zea mays
cagccgcagtcggattaggac

SEQ ID NO: 1335 - DNA, 21 bp, Zea mays
acgagtcttttgtgcgcactt

SEQ ID NO: 1336 - DNA, 21 bp, Zea mays
gtctccgccatctagcgacgt

SEQ ID NO: 1337 - DNA, 21 bp, Zea mays
tcaaccagatcgcgccccgct

SEQ ID NO: 1338 - DNA, 21 bp, Zea mays
aagactgcgcagaagtcaaac

SEQ ID NO: 1339 - DNA, 21 bp, Zea mays
aaacgaacaaggcctaagatg

SEQ ID NO: 1340 - DNA, 21 bp, Zea mays
taggccctgtttggaagcacc

SEQ ID NO: 1341 - DNA, 21 bp, Zea mays
cactcggcaaagaacgcgatt

SEQ ID NO: 1342 - DNA, 21 bp, Zea mays
agccttctttgccgagtactt

SEQ ID NO: 1343 - DNA, 21 bp, Zea mays
tcactctcttctgtcagcttt

SEQ ID NO: 1344 - DNA, 21 bp, Zea mays
ctttgccgagtgtttttttcg

SEQ ID NO: 1345 - DNA, 21 bp, Zea mays
ttttcagcttcggctctggct

SEQ ID NO: 1346 - DNA, 21 bp, Zea mays
atgcggcggactgtgctcgtt

SEQ ID NO: 1347 - DNA, 21 bp, Zea mays
agcacggcactaagcctgctt

SEQ ID NO: 1348 - DNA, 21 bp, Zea mays
tgagcctgtaagcgctggtgg

SEQ ID NO: 1349 - DNA, 21 bp, Zea mays
tggaccgaaggcgtggcacga

SEQ ID NO: 1350 - DNA, 21 bp, Zea mays
cggccaaaccacggcgaccta

SEQ ID NO: 1351 - DNA, 21 bp, Zea mays
cgtgggtacccacgttcttat

SEQ ID NO: 1352 - DNA, 21 bp, Zea mays
cggccaaaccacggcgatcta

SEQ ID NO: 1353 - DNA, 21 bp, Zea mays
gcgtcgtcctcctggtgtggc

SEQ ID NO: 1354 - DNA, 21 bp, Zea mays
ctttgccgagtgccagccgtt

SEQ ID NO: 1355 - DNA, 21 bp, Zea mays
gctaacttcctagagacggcc

SEQ ID NO: 1356 - DNA, 21 bp, Zea mays
ccatagcactcggcaaagaaa

SEQ ID NO: 1357 - DNA, 21 bp, Zea mays
ccatagcactcggcaaagaag

SEQ ID NO: 1358 - DNA, 21 bp, Zea mays
caagcaagattggtcggatta

SEQ ID NO: 1359 - DNA, 21 bp, Zea mays
gtgagtgtccgtgcgttacag

SEQ ID NO: 1360 - DNA, 21 bp, Zea mays
atctagatctaaccgaccaag

SEQ ID NO: 1361 - DNA, 21 bp, Zea mays
agatcttggcgccgagctgcg

SEQ ID NO: 1362 - DNA, 21 bp, Zea mays
tggcactcggcaaagaagcaa

SEQ ID NO: 1363 - DNA, 21 bp, Zea mays
tgcgaaggccctgacgctgtg

SEQ ID NO: 1364 - DNA, 21 bp, Zea mays
gccgagatgccagcctaagga

SEQ ID NO: 1365 - DNA, 21 bp, Zea mays
catcctgcagacggcgtgcat

SEQ ID NO: 1366 - DNA, 21 bp, Zea mays
ccctgaagcggctcagtgaca

SEQ ID NO: 1367 - DNA, 21 bp, Zea mays
gcttctttgccgagtgtggtg

SEQ ID NO: 1368 - DNA, 21 bp, Zea mays
aagcccggcacggctattgga

SEQ ID NO: 1369 - DNA, 21 bp, Zea mays
atggcctgtttggttcgtggc

SEQ ID NO: 1370 - DNA, 21 bp, Zea mays
gacgacgacgacgatgacgat

SEQ ID NO: 1371 - DNA, 21 bp, Zea mays
cagagcaggctcaatggacaa

SEQ ID NO: 1372 - DNA, 21 bp, Zea mays
agagcaggctcggatgagtga

SEQ ID NO: 1373 - DNA, 21 bp, Zea mays
agcctttgccgagtgtcagtt

SEQ ID NO: 1374 - DNA, 21 bp, Zea mays
ttagctggaacgattccggat

SEQ ID NO: 1375 - DNA, 21 bp, Zea mays
ttctttgccgagtgccagata

SEQ ID NO: 1376 - DNA, 21 bp, Zea mays
tggcactcggcaaagaagctc

SEQ ID NO: 1377 - DNA, 21 bp, Zea mays
ttctttgccgagtgccaaagc

SEQ ID NO: 1378 - DNA, 21 bp, Zea mays
gaagactggtgcacatgatgc

SEQ ID NO: 1379 - DNA, 21 bp, Zea mays
tgatgctgcggtagtggtctc

SEQ ID NO: 1380 - DNA, 21 bp, Zea mays
gagttcagcgaaggggacctc

SEQ ID NO: 1381 - DNA, 21 bp, Zea mays
gacacaaacgaacaaggcctg

SEQ ID NO: 1382 - DNA, 21 bp, Zea mays
agccagggatgatttgcctgt

SEQ ID NO: 1383 - DNA, 21 bp, Zea mays
gcaacccagggtgtttgaagc

SEQ ID NO: 1384 - DNA, 21 bp, Zea mays
aggtgagtgaccgtgcgttgc

SEQ ID NO: 1385 - DNA, 21 bp, Zea mays
ccaagatctacggcgccgagg

SEQ ID NO: 1386 - DNA, 21 bp, Zea mays
ttctttgccgagtgccaacgt

SEQ ID NO: 1387 - DNA, 21 bp, Zea mays
tgaggcgaaggcaagcttgca

SEQ ID NO: 1388 - DNA, 21 bp, Zea mays
acttcgccagtgcttatcagc

SEQ ID NO: 1389 - DNA, 21 bp, Zea mays
gaactaagtcgcagcgaggtc

SEQ ID NO: 1390 - DNA, 21 bp, Zea mays
ccatagatcttggcgccgagg

SEQ ID NO: 1391 - DNA, 21 bp, Zea mays
aaagactttgccgagtgctga

SEQ ID NO: 1392 - DNA, 21 bp, Zea mays
tggaagccatcggatgccgga

SEQ ID NO: 1393 - DNA, 21 bp, Zea mays
agccggatgtgcttgctccgt

SEQ ID NO: 1394 - DNA, 21 bp, Zea mays
agcctttgccgagtgtcacct

SEQ ID NO: 1395 - DNA, 21 bp, Zea mays
cgcatgacgaccgttgaaaac

SEQ ID NO: 1396 - DNA, 21 bp, Zea mays
accggcggtgagattgctccg

SEQ ID NO: 1397 - DNA, 21 bp, Zea mays
acagctggtatcggagcaaat

SEQ ID NO: 1398 - DNA, 21 bp, Zea mays
gtcgaagacctcatagtgtcg

SEQ ID NO: 1399 - DNA, 21 bp, Zea mays
aaacacgactgagtgcagggc

SEQ ID NO: 1400 - DNA, 21 bp, Zea mays
aagagacctacttgcacgatt

SEQ ID NO: 1401 - DNA, 21 bp, Zea mays
gtgtaagcgatagcggcgagg

SEQ ID NO: 1402 - DNA, 21 bp, Zea mays
gctaacttcctagaggcaacc

SEQ ID NO: 1403 - DNA, 21 bp, Zea mays
agagcaggctcggatgagcaa

SEQ ID NO: 1404 - DNA, 21 bp, Zea mays
ggcgagacggactgggcagag

SEQ ID NO: 1405 - DNA, 21 bp, Zea mays
ttggcgaagtcctgcgtagat

SEQ ID NO: 1406 - DNA, 21 bp, Zea mays
gagtgtctgctggactaacgc

SEQ ID NO: 1407 - DNA, 21 bp, Zea mays
atgtccgacggcccgccacct

SEQ ID NO: 1408 - DNA, 21 bp, Zea mays
gttcttggccctatccacatg

SEQ ID NO: 1409 - DNA, 21 bp, Zea mays
agcctttgccgagtgtccact

SEQ ID NO: 1410 - DNA, 21 bp, Zea mays
gcattcatgtgcattatgcaa

SEQ ID NO: 1411 - DNA, 21 bp, Zea mays
ggcgaggttgacgacgagata

SEQ ID NO: 1412 - DNA, 21 bp, Zea mays
caatcaggagcattttgggtg

SEQ ID NO: 1413 - DNA, 21 bp, Zea mays
gacggagacagcgtcttcgcc

SEQ ID NO: 1414 - DNA, 21 bp, Zea mays
cggctttttgccgagtgttaa

SEQ ID NO: 1415 - DNA, 21 bp, Zea mays
gtgagaggctgcaaacatttt

SEQ ID NO: 1416 - DNA, 21 bp, Zea mays
aaacactgtgttgtgggtcca

SEQ ID NO: 1417 - DNA, 21 bp, Zea mays
cgaccaaaaaatactcgggcc

SEQ ID NO: 1418 - DNA, 21 bp, Zea mays
cgacgactttggccgtcgaag

SEQ ID NO: 1419 - DNA, 21 bp, Zea mays
attaggagcgtgggtacccac

SEQ ID NO: 1420 - DNA, 21 bp, Zea mays
tctgctggtgtgagatggtca

SEQ ID NO: 1421 - DNA, 21 bp, Zea mays
ccgacgcaaacgaacaagacc

SEQ ID NO: 1422 - DNA, 21 bp, Zea mays
cgtgcgttgcaacggaaccat

SEQ ID NO: 1423 - DNA, 21 bp, Zea mays
ccgaattccgtccacgcccgg

SEQ ID NO: 1424 - DNA, 21 bp, Zea mays
gtgtaagcctgaatgaccttc

SEQ ID NO: 1425 - DNA, 21 bp, Zea mays
agccttctttgccgagtgcca

SEQ ID NO: 1426 - DNA, 21 bp, Zea mays
gctggctccgtcttcacttga

SEQ ID NO: 1427 - DNA, 21 bp, Zea mays
actggacatgtttggtgccgc

SEQ ID NO: 1428 - DNA, 21 bp, Zea mays
gtttggtttgtggctaaatat

SEQ ID NO: 1429 - DNA, 21 bp, Zea mays
ccgacgcaaacgaacaatgcc

SEQ ID NO: 1430 - DNA, 21 bp, Zea mays
tgaacccatgatgcaccacct

SEQ ID NO: 1431 - DNA, 21 bp, Zea mays
tagggctagtttgggagccag

SEQ ID NO: 1432 - DNA, 21 bp, Zea mays
aagcactcggcaaagaaggca

SEQ ID NO: 1433 - DNA, 21 bp, Zea mays
gcttctttgccgagtgtcaag

SEQ ID NO: 1434 - DNA, 21 bp, Zea mays
aaacaggaccttgggtcttag

SEQ ID NO: 1435 - DNA, 21 bp, Zea mays
atgtgcccgtgcgttgctacg

SEQ ID NO: 1436 - DNA, 21 bp, Zea mays
ttatgtccgacggctttgtcc

SEQ ID NO: 1437 - DNA, 21 bp, Zea mays
gtttcggcctaggtcttagct

SEQ ID NO: 1438 - DNA, 21 bp, Zea mays
aaacctaaacacacgacgtgg

SEQ ID NO: 1439 - DNA, 21 bp, Zea mays
cgacctctttgccgagtgtcc

SEQ ID NO: 1440 - DNA, 21 bp, Zea mays
aaaaccggttgaaccgcccct

SEQ ID NO: 1441 - DNA, 21 bp, Zea mays
tcacaaaaatgaggataggcc

SEQ ID NO: 1442 - DNA, 21 bp, Zea mays
gacgccgaggtaacacatagt

SEQ ID NO: 1443 - DNA, 21 bp, Zea mays
agagcaggctcggatgagtgt

SEQ ID NO: 1444 - DNA, 21 bp, Zea mays
gtagtgcttctgagtagagtc

SEQ ID NO: 1445 - DNA, 21 bp, Zea mays
ctgcggctactgtgtccggtg

SEQ ID NO: 1446 - DNA, 21 bp, Zea mays
ggcgacgacttcgtacggcga

SEQ ID NO: 1447 - DNA, 21 bp, Zea mays
agctgccaggagtaagtatca

SEQ ID NO: 1448 - DNA, 21 bp, Zea mays
gtcatggatgagaggagagag

SEQ ID NO: 1449 - DNA, 21 bp, Zea mays
tcagtgactggtactgcacgg

SEQ ID NO: 1450 - DNA, 21 bp, Zea mays
gcagcccactacggtgtagta

SEQ ID NO: 1451 - DNA, 21 bp, Zea mays
ggctcgaccggattgcaccgt

SEQ ID NO: 1452 - DNA, 21 bp, Zea mays
tgatgctgcggtagtggtcac

SEQ ID NO: 1453 - DNA, 21 bp, Zea mays
aaaagcactcggcaaagatct

SEQ ID NO: 1454 - DNA, 21 bp, Zea mays
aggccttgttcgtttgtgttg

SEQ ID NO: 1455 - DNA, 21 bp, Zea mays
gagggtgacttggccagacat

SEQ ID NO: 1456 - DNA, 21 bp, Zea mays
gccgactactcctacaaattg

SEQ ID NO: 1457 - DNA, 21 bp, Zea mays
acagctggtatcggagcttgt

SEQ ID NO: 1458 - DNA, 21 bp, Zea mays
gagcttgactctagtccgact

SEQ ID NO: 1459 - DNA, 21 bp, Zea mays
tacgaccgatttcaggagcgg

SEQ ID NO: 1460 - DNA, 21 bp, Zea mays
agagcaggctcggatgagaga

SEQ ID NO: 1461 - DNA, 21 bp, Zea mays
tcgaggacgagctgcttgtcc

SEQ ID NO: 1462 - DNA, 21 bp, Zea mays
ctctgcagatctcccgaagac

SEQ ID NO: 1463 - DNA, 21 bp, Zea mays
tagcgacgttgctttttgatt

SEQ ID NO: 1464 - DNA, 21 bp, Zea mays
cttgactctagcgtccgaggc

SEQ ID NO: 1465 - DNA, 21 bp, Zea mays
acttcgccgagtgtttttcag

SEQ ID NO: 1466 - DNA, 21 bp, Zea mays
cagctgacaccgaatgccata

SEQ ID NO: 1467 - DNA, 21 bp, Zea mays
ctttgccgagtgtctgcgatc

SEQ ID NO: 1468 - DNA, 21 bp, Zea mays
ctttgccgagtgccagctgga

SEQ ID NO: 1469 - DNA, 21 bp, Zea mays
ctttgccgagtgccagcaggg

SEQ ID NO: 1470 - DNA, 21 bp, Zea mays
ggcggtctggcgaagtgagac

SEQ ID NO: 1471 - DNA, 21 bp, Zea mays
ccctacctggcgcgccaaatg

SEQ ID NO: 1472 - DNA, 21 bp, Zea mays
tagtcggttgtccgtgcgttg

SEQ ID NO: 1473 - DNA, 21 bp, Zea mays
gaaacgaacaaggcctaagca

SEQ ID NO: 1474 - DNA, 21 bp, Zea mays
atcaggctgcgttggtaatca

SEQ ID NO: 1475 - DNA, 21 bp, Zea mays
ttctcgaacacgcaggagagt

SEQ ID NO: 1476 - DNA, 21 bp, Zea mays
agcaagtctgcgaggcgtggc

SEQ ID NO: 1477 - DNA, 21 bp, Zea mays
gatgcattttgcgcatgggag

SEQ ID NO: 1478 - DNA, 21 bp, Zea mays
ggcgacgacttcgtacggcgg

SEQ ID NO: 1479 - DNA, 21 bp, Zea mays
cccgtgcgttgcaacggagac

SEQ ID NO: 1480 - DNA, 21 bp, Zea mays
cgctgtggacttcgcgcagga

SEQ ID NO: 1481 - DNA, 21 bp, Zea mays
caagcccgaaaaggcccgtat

SEQ ID NO: 1482 - DNA, 21 bp, Zea mays
ctgtgccaaacagggcctacg

SEQ ID NO: 1483 - DNA, 21 bp, Zea mays
tctcgagacttcggatggacg

SEQ ID NO: 1484 - DNA, 21 bp, Zea mays
ctccgcgatacggctgatcag

SEQ ID NO: 1485 - DNA, 21 bp, Zea mays
gggtgttacgctccggcggcc

SEQ ID NO: 1486 - DNA, 21 bp, Zea mays
ggtttgaccctcaagtgacga

SEQ ID NO: 1487 - DNA, 21 bp, Zea mays
agggcctgattggttgccgta

SEQ ID NO: 1488 - DNA, 21 bp, Zea mays
atgtgaccgttgatggacgtg

SEQ ID NO: 1489 - DNA, 21 bp, Zea mays
cttcagttgtggcaaggcgga

SEQ ID NO: 1490 - DNA, 21 bp, Zea mays
ccatagcactcggcaaaggat

SEQ ID NO: 1491 - DNA, 21 bp, Zea mays
tcggcaggaactgttgtcttt

SEQ ID NO: 1492 - DNA, 21 bp, Zea mays
tgggcgcagtcttcgccgtga

SEQ ID NO: 1493 - DNA, 21 bp, Zea mays
ctgcgcagaagtcaaacaacc

SEQ ID NO: 1494 - DNA, 21 bp, Zea mays
gcttctttgccgagtgtcaaa

SEQ ID NO: 1495 - DNA, 21 bp, Zea mays
tttcggtgacgcacttaagca

SEQ ID NO: 1496 - DNA, 21 bp, Zea mays
tagggctagtttgggagcccc

SEQ ID NO: 1497 - DNA, 21 bp, Zea mays
aaaacgtctatggatgcagat

SEQ ID NO: 1498 - DNA, 21 bp, Zea mays
cagtctttgccgagtgcccat

SEQ ID NO: 1499 - DNA, 21 bp, Zea mays
tttctttgccgagtgccacca

SEQ ID NO: 1500 - DNA, 21 bp, Zea mays
tcgcgagctaaacgagctatc

SEQ ID NO: 1501 - DNA, 21 bp, Zea mays
tggcgcctgagaatccatggt

SEQ ID NO: 1502 - DNA, 21 bp, Zea mays
gctgatttggtgaccagaaaa

SEQ ID NO: 1503 - DNA, 21 bp, Zea mays
gtgacactcggcaaagacgcc

SEQ ID NO: 1504 - DNA, 21 bp, Zea mays
ccattgcgacggcgcatggtg

SEQ ID NO: 1505 - DNA, 21 bp, Zea mays
ggcaaagactttgccgagtgc

SEQ ID NO: 1506 - DNA, 21 bp, Zea mays
cgtgctaaacgggccgtgccc

SEQ ID NO: 1507 - DNA, 21 bp, Zea mays
tccaacggagcagctaaatgg

SEQ ID NO: 1508 - DNA, 21 bp, Zea mays
aaccgcttgtgatgtgtggct

SEQ ID NO: 1509 - DNA, 21 bp, Zea mays
accaaaacgaccggatgtgag

SEQ ID NO: 1510 - DNA, 21 bp, Zea mays
tccgttgtagtctagctagtt

SEQ ID NO: 1511 - DNA, 21 bp, Zea mays
caagtgctcggcgaaaggcta

SEQ ID NO: 1512 - DNA, 21 bp, Zea mays
ctccccgctcaggcggaggcc

SEQ ID NO: 1513 - DNA, 21 bp, Zea mays
cccgtgcgttgcaacgagaac

SEQ ID NO: 1514 - DNA, 21 bp, Zea mays
ctgggccaagcccattccagc

SEQ ID NO: 1515 - DNA, 21 bp, Zea mays
attgcaaccatcagtattatg

SEQ ID NO: 1516 - DNA, 21 bp, Zea mays
cgtgcgttgctacggagttaa

SEQ ID NO: 1517 - DNA, 21 bp, Zea mays
gcgagcgtagttcagtggtaa

SEQ ID NO: 1518 - DNA, 21 bp, Zea mays
tgcttatgggaagggagacgg

SEQ ID NO: 1519 - DNA, 21 bp, Zea mays
ccgaaccgaaccgaagaaccg

SEQ ID NO: 1520 - DNA, 21 bp, Zea mays
gattaccaaacacagaacata

SEQ ID NO: 1521 - DNA, 21 bp, Zea mays
aagggtgcgtttggttgtgga

SEQ ID NO: 1522 - DNA, 21 bp, Zea mays
ctgaattaagtccgacggctc

SEQ ID NO: 1523 - DNA, 21 bp, Zea mays
cgacgagaggaaggaggacgc

SEQ ID NO: 1524 - DNA, 21 bp, Zea mays
actccctcgggatgactgtgt

SEQ ID NO: 1525 - DNA, 21 bp, Zea mays
ttctttgccgagtgccacggt

SEQ ID NO: 1526 - DNA, 21 bp, Zea mays
gctaacttcctagaggcgacc

SEQ ID NO: 1527 - DNA, 21 bp, Zea mays
cgccgcgccgggccgccacga

SEQ ID NO: 1528 - DNA, 21 bp, Zea mays
acagcctatggcgccgagctg

SEQ ID NO: 1529 - DNA, 21 bp, Zea mays
caaagacctcagacagctatg

SEQ ID NO: 1530 - DNA, 21 bp, Zea mays
gtacattcgggccgcccggtc

SEQ ID NO: 1531 - DNA, 21 bp, Zea mays
aaaagcactcggcaaagaaaa

SEQ ID NO: 1532 - DNA, 21 bp, Zea mays
ggtggtgtgtgcctgatgact

SEQ ID NO: 1533 - DNA, 21 bp, Zea mays
ccagtgacgggaagacactgt

SEQ ID NO: 1534 - DNA, 21 bp, Zea mays
gatggacggccaagtcactct

SEQ ID NO: 1535 - DNA, 21 bp, Zea mays
cactcgacaaagaaggctcca

SEQ ID NO: 1536 - DNA, 21 bp, Zea mays
tgcgctaacagacgtggagca

SEQ ID NO: 1537 - DNA, 21 bp, Zea mays
ttatgtccgacggctttggcc

SEQ ID NO: 1538 - DNA, 21 bp, Zea mays
ggccactgcacgacggcagtc

SEQ ID NO: 1539 - DNA, 21 bp, Zea mays
aaaagcactcggcaaagccac

SEQ ID NO: 1540 - DNA, 21 bp, Zea mays
gggtacagaaccctttagggt

SEQ ID NO: 1541 - DNA, 21 bp, Zea mays
agaggaccgtttagaggacgc

SEQ ID NO: 1542 - DNA, 21 bp, Zea mays
gtgttttgcggagacggatgc

SEQ ID NO: 1543 - DNA, 21 bp, Zea mays
aggatcccgcttgtgctcttg

SEQ ID NO: 1544 - DNA, 21 bp, Zea mays
acactcggcaaagactttgct

SEQ ID NO: 1545 - DNA, 21 bp, Zea mays
aaaacactcggcaaagagttt

SEQ ID NO: 1546 - DNA, 21 bp, Zea mays
ctgcgcagaagtcaaacagcc

SEQ ID NO: 1547 - DNA, 21 bp, Zea mays
gccataggctatggcgccgaa

SEQ ID NO: 1548 - DNA, 21 bp, Zea mays
gttggagcggggtgttttgtt

SEQ ID NO: 1549 - DNA, 21 bp, Zea mays
catagcctatggcgccgagct

SEQ ID NO: 1550 - DNA, 21 bp, Zea mays
ataggctatggcgccgagctt

SEQ ID NO: 1551 - DNA, 21 bp, Zea mays
cctagctcggcgccaagatct

SEQ ID NO: 1552 - DNA, 21 bp, Zea mays
aaggctttgccgagtgtgaca

SEQ ID NO: 1553 - DNA, 21 bp, Zea mays
gtgactgtgagagcgggatgg

SEQ ID NO: 1554 - DNA, 21 bp, Zea mays
accacattcgtttctgccctc

SEQ ID NO: 1555 - DNA, 21 bp, Zea mays
aaggctttgccgagtgtattc

SEQ ID NO: 1556 - DNA, 21 bp, Zea mays
ataggctatgacgccgagcaa

SEQ ID NO: 1557 - DNA, 21 bp, Zea mays
gtagagatggcaatggggatt

SEQ ID NO: 1558 - DNA, 21 bp, Zea mays
attagcgggctggtgctggca

SEQ ID NO: 1559 - DNA, 21 bp, Zea mays
atcgctgcgacccgcatcggc

SEQ ID NO: 1560 - DNA, 21 bp, Zea mays
gcactcgacaaagaaagcaca

SEQ ID NO: 1561 - DNA, 21 bp, Zea mays
gttgctgtgagccaggctcta

SEQ ID NO: 1562 - DNA, 21 bp, Zea mays
cttgcaggtagaagccatccg

SEQ ID NO: 1563 - DNA, 21 bp, Zea mays
cttccgacgggacccgtctta

SEQ ID NO: 1564 - DNA, 21 bp, Zea mays
gctgaatattggctgcgccct

SEQ ID NO: 1565 - DNA, 21 bp, Zea mays
gtccgacggctagactgacca

SEQ ID NO: 1566 - DNA, 21 bp, Zea mays
cacgagtcgagcgagctcacc

SEQ ID NO: 1567 - DNA, 21 bp, Zea mays
tgggccgtgcccgtccggcgg

SEQ ID NO: 1568 - DNA, 21 bp, Zea mays
agtgtgacacagttagccacg

SEQ ID NO: 1569 - DNA, 21 bp, Zea mays
agtcttttgtgcgcactttgt

SEQ ID NO: 1570 - DNA, 21 bp, Zea mays
caagagccaagaacgtcgtgc

SEQ ID NO: 1571 - DNA, 21 bp, Zea mays
cgcacttgttgtgctaagtcc

SEQ ID NO: 1572 - DNA, 21 bp, Zea mays
gagagccacaaaaccggagag

SEQ ID NO: 1573 - DNA, 21 bp, Zea mays
aagacgaagctagcagcgcga

SEQ ID NO: 1574 - DNA, 21 bp, Zea mays
tggcactcggcaaagaaactt

SEQ ID NO: 1575 - DNA, 21 bp, Zea mays
gcagatccgaagacggggtgt

SEQ ID NO: 1576 - DNA, 21 bp, Zea mays
agcggtccttctatgcaaacg

SEQ ID NO: 1577 - DNA, 21 bp, Zea mays
cccaagaatcaggtgaagaca

SEQ ID NO: 1578 - DNA, 21 bp, Zea mays
gcgaaggttgtcgacgttcca

SEQ ID NO: 1579 - DNA, 21 bp, Zea mays
ccccccccccccccccccatc

SEQ ID NO: 1580 - DNA, 21 bp, Zea mays
aagactggagcatgggagcag

SEQ ID NO: 1581 - DNA, 21 bp, Zea mays
gcgggtttgggtgtgagttta

SEQ ID NO: 1582 - DNA, 21 bp, Zea mays
gggcctgtttggtttgtggcg

SEQ ID NO: 1583 - DNA, 21 bp, Zea mays
tcactcgtcccgcaaccgttc

SEQ ID NO: 1584 - DNA, 21 bp, Zea mays
accgctgcggctataggtcgg

SEQ ID NO: 1585 - DNA, 21 bp, Zea mays
ctaaacactgtgctatgagtc

SEQ ID NO: 1586 - DNA, 21 bp, Zea mays
cacagatcttggtgccgagct

SEQ ID NO: 1587 - DNA, 21 bp, Zea mays
ccatagatcttggcgccgggc

SEQ ID NO: 1588 - DNA, 21 bp, Zea mays
ttctttgccgagtgccagctg

SEQ ID NO: 1589 - DNA, 21 bp, Zea mays
ctttgccgagtgccagcgtgc

SEQ ID NO: 1590 - DNA, 21 bp, Zea mays
ctgctctgaccggcggcgcac

SEQ ID NO: 1591 - DNA, 21 bp, Zea mays
acgcgatcgaacacgtggaag

SEQ ID NO: 1592 - DNA, 21 bp, Zea mays
agatcttggcgccgagctcgg

SEQ ID NO: 1593 - DNA, 21 bp, Zea mays
actggtttattgggctgcaaa

SEQ ID NO: 1594 - DNA, 21 bp, Zea mays
agcctcggcccatagtgctga

SEQ ID NO: 1595 - DNA, 21 bp, Zea mays
gagggctgtaaacatcgtggt

SEQ ID NO: 1596 - DNA, 21 bp, Zea mays
ctggaccgtgctttttttccg

SEQ ID NO: 1597 - DNA, 21 bp, Zea mays
cgtgcgttgctacggagtcag

SEQ ID NO: 1598 - DNA, 21 bp, Zea mays
catagtctatggcgccgagca

SEQ ID NO: 1599 - DNA, 21 bp, Zea mays
gggctaacacggcacgttaga

SEQ ID NO: 1600 - DNA, 21 bp, Zea mays
ttctttgccgagtgccaaaaa

SEQ ID NO: 1601 - DNA, 21 bp, Zea mays
acaggctatggcgccgagcta

SEQ ID NO: 1602 - DNA, 21 bp, Zea mays
atgcgggtcgcagcgatggcg

SEQ ID NO: 1603 - DNA, 21 bp, Zea mays
gcagtgaccgcacttataccc

SEQ ID NO: 1604 - DNA, 21 bp, Zea mays
acgtggggcagcaggctgctg

SEQ ID NO: 1605 - DNA, 21 bp, Zea mays
taggccctgtttggaagcgga

SEQ ID NO: 1606 - DNA, 21 bp, Zea mays
tttctttgccgagtgcccgat

SEQ ID NO: 1607 - DNA, 21 bp, Zea mays
cggcaaagcctttgtcgagcg

SEQ ID NO: 1608 - DNA, 21 bp, Zea mays
ttttgtggctcgtgtgctagg

SEQ ID NO: 1609 - DNA, 21 bp, Zea mays
acactcggcaaagactttgtc

SEQ ID NO: 1610 - DNA, 21 bp, Zea mays
gacactcggcaaagactttgc

SEQ ID NO: 1611 - DNA, 21 bp, Zea mays
cagctgacaccgaatgccgtg

SEQ ID NO: 1612 - DNA, 21 bp, Zea mays
ggtggtgtgtgcctgatacct

SEQ ID NO: 1613 - DNA, 21 bp, Zea mays
cgctgtggacttcgcgcatga

SEQ ID NO: 1614 - DNA, 21 bp, Zea mays
cgtgcgttgcaacggaaacat

SEQ ID NO: 1615 - DNA, 21 bp, Zea mays
atcgcgatccattaccacccc

SEQ ID NO: 1616 - DNA, 21 bp, Zea mays
cagacgccgccgaaaataagc

SEQ ID NO: 1617 - DNA, 21 bp, Zea mays
cagacgccgccgaaaatagct

SEQ ID NO: 1618 - DNA, 21 bp, Zea mays
acactcggcaaagtgactcaa

SEQ ID NO: 1619 - DNA, 21 bp, Zea mays
acagcctatggcgccgagcat

SEQ ID NO: 1620 - DNA, 21 bp, Zea mays
cctgccaaacaggcagcttct

SEQ ID NO: 1621 - DNA, 21 bp, Zea mays
aatgactgcagcggcgcctgc

SEQ ID NO: 1622 - DNA, 21 bp, Zea mays
cgagtgcgacactcggtaaag

SEQ ID NO: 1623 - DNA, 21 bp, Zea mays
gacaaacttgtgttgtggctt

SEQ ID NO: 1624 - DNA, 21 bp, Zea mays
gcttctttgccgagtgtctgc

SEQ ID NO: 1625 - DNA, 21 bp, Zea mays
tccgacccgacggattaggat

SEQ ID NO: 1626 - DNA, 21 bp, Zea mays
aaacacgactgagtgcagggt

SEQ ID NO: 1627 - DNA, 21 bp, Zea mays
ctcgcgcctctactgctgacg

SEQ ID NO: 1628 - DNA, 21 bp, Zea mays
cgtacatcgctgtgactggca

SEQ ID NO: 1629 - DNA, 21 bp, Zea mays
agtgagaagttgccggccggc

SEQ ID NO: 1630 - DNA, 21 bp, Zea mays
gaggatagaccccacccgcag

SEQ ID NO: 1631 - DNA, 21 bp, Zea mays
cagtctacgggttccttagag

SEQ ID NO: 1632 - DNA, 21 bp, Zea mays
cagtctttgccgagtgctttg

SEQ ID NO: 1633 - DNA, 21 bp, Zea mays
agcactcgacaaaagaaagca

SEQ ID NO: 1634 - DNA, 21 bp, Zea mays
aaatctaacccgcgctccctg

SEQ ID NO: 1635 - DNA, 21 bp, Zea mays
aaggctttgccgagtgttttt

SEQ ID NO: 1636 - DNA, 21 bp, Zea mays
aaaacactcggcaaagaactt

SEQ ID NO: 1637 - DNA, 21 bp, Zea mays
ggccgacccatttatcgggcc

SEQ ID NO: 1638 - DNA, 21 bp, Zea mays
cccgtgcgttgcgacggcata

SEQ ID NO: 1639 - DNA, 21 bp, Zea mays
gactctggtttcggctaattt

SEQ ID NO: 1640 - DNA, 21 bp, Zea mays
ctgccgttaatcgatctggac

SEQ ID NO: 1641 - DNA, 21 bp, Zea mays
gccacggacggtccagatcga

SEQ ID NO: 1642 - DNA, 21 bp, Zea mays
tgaggccttgttcgtttgtgt

SEQ ID NO: 1643 - DNA, 21 bp, Zea mays
atcaggctgcgttggtaatcg

SEQ ID NO: 1644 - DNA, 21 bp, Zea mays
catcctgcagacggcgtgcct

SEQ ID NO: 1645 - DNA, 21 bp, Zea mays
agccttctttgccgagtgcga

SEQ ID NO: 1646 - DNA, 21 bp, Zea mays
actcggcaaagagggctttgc

SEQ ID NO: 1647 - DNA, 21 bp, Zea mays
caagctttgccgagtgccagt

SEQ ID NO: 1648 - DNA, 21 bp, Zea mays
acgggccacgagtgaggccca

SEQ ID NO: 1649 - DNA, 21 bp, Zea mays
taagcttatgtccgacggtct

SEQ ID NO: 1650 - DNA, 21 bp, Zea mays
acgattccgggtgcaatccga

SEQ ID NO: 1651 - DNA, 21 bp, Zea mays
taagcttatgtccgacggcct

SEQ ID NO: 1652 - DNA, 21 bp, Zea mays
gagcagacacgacacagaggt

SEQ ID NO: 1653 - DNA, 21 bp, Zea mays
ggagggcaaggactcgccccc

SEQ ID NO: 1654 - DNA, 21 bp, Zea mays
gtctgtgcgttgcaacgagaa

SEQ ID NO: 1655 - DNA, 21 bp, Zea mays
atccgtcggcttaggactaac

SEQ ID NO: 1656 - DNA, 21 bp, Zea mays
ctttgccgagtgtttttttat

SEQ ID NO: 1657 - DNA, 21 bp, Zea mays
cggctttttgccgagtgctaa

SEQ ID NO: 1658 - DNA, 21 bp, Zea mays
cactcgactgtccaacccggt

SEQ ID NO: 1659 - DNA, 21 bp, Zea mays
ctgtgcactggagcagcatgg

SEQ ID NO: 1660 - DNA, 21 bp, Zea mays
agctgccaggagtaagtacta

SEQ ID NO: 1661 - DNA, 21 bp, Zea mays
caagctttgccgagtgccctc

SEQ ID NO: 1662 - DNA, 21 bp, Zea mays
ccggcacaactaaacaaggcc

SEQ ID NO: 1663 - DNA, 21 bp, Zea mays
taagcttatgtccgacggccg

SEQ ID NO: 1664 - DNA, 21 bp, Zea mays
gctgaatattggctgcgctct

SEQ ID NO: 1665 - DNA, 21 bp, Zea mays
acactcggcaaagtgaccagt

SEQ ID NO: 1666 - DNA, 21 bp, Zea mays
caaacgaacgcagcctaagtg

SEQ ID NO: 1667 - DNA, 21 bp, Zea mays
ggcgacgacttcgtacgacgg

SEQ ID NO: 1668 - DNA, 21 bp, Zea mays
tgtcgaagtcagtgctggacc

SEQ ID NO: 1669 - DNA, 21 bp, Zea mays
ctttgccgagtgccagcgatc

SEQ ID NO: 1670 - DNA, 21 bp, Zea mays
tctcagcaggaaatcagcaag

SEQ ID NO: 1671 - DNA, 21 bp, Zea mays
gctaacttcctagaggcccag

SEQ ID NO: 1672 - DNA, 21 bp, Zea mays
aacgctatgtccgacggcatc

SEQ ID NO: 1673 - DNA, 21 bp, Zea mays
acagccgtcggacataatctt

SEQ ID NO: 1674 - DNA, 21 bp, Zea mays
acggcggctttgccgagtgtc

SEQ ID NO: 1675 - DNA, 21 bp, Zea mays
tttctttgccgagtgcaccct

SEQ ID NO: 1676 - DNA, 21 bp, Zea mays
agcgaagctgaggcgtgctgc

SEQ ID NO: 1677 - DNA, 21 bp, Zea mays
cggaccgtgctttgagccagt

SEQ ID NO: 1678 - DNA, 21 bp, Zea mays
gactggcgggacacgtgtaca

SEQ ID NO: 1679 - DNA, 21 bp, Zea mays
acactcggcaaagacttcgcc

SEQ ID NO: 1680 - DNA, 21 bp, Zea mays
cggccggccggccggccacca

SEQ ID NO: 1681 - DNA, 21 bp, Zea mays
ggacaccatgactggcgcaga

SEQ ID NO: 1682 - DNA, 21 bp, Zea mays
cgctgtgactcaaccttgcgc

SEQ ID NO: 1683 - DNA, 21 bp, Zea mays
gcttctttgccgagtgtcaat

SEQ ID NO: 1684 - DNA, 21 bp, Zea mays
ggagctgggcgcgtgggcggg

SEQ ID NO: 1685 - DNA, 21 bp, Zea mays
atccgaagccatctgccatgg

SEQ ID NO: 1686 - DNA, 21 bp, Zea mays
aaagatactgggccagtttgg

SEQ ID NO: 1687 - DNA, 21 bp, Zea mays
cgaccgttgaaactggtgctt

SEQ ID NO: 1688 - DNA, 21 bp, Zea mays
ttggtctaaccgaacaagctc

SEQ ID NO: 1689 - DNA, 21 bp, Zea mays
gtgtaagcctgaatgacttgc

SEQ ID NO: 1690 - DNA, 21 bp, Zea mays
cttgcggcttgcctgcccggt

SEQ ID NO: 1691 - DNA, 21 bp, Zea mays
tccaacggtgctgcgtcaggg

SEQ ID NO: 1692 - DNA, 21 bp, Zea mays
caacggctagttgcgtctagg

SEQ ID NO: 1693 - DNA, 21 bp, Zea mays
gtatccgacccgataggaccg

SEQ ID NO: 1694 - DNA, 21 bp, Zea mays
aagcactcggcaaagaagccg

SEQ ID NO: 1695 - DNA, 21 bp, Zea mays
accgttgcaacgcacgggcac

SEQ ID NO: 1696 - DNA, 21 bp, Zea mays
ttggctgagtctgtggcaggc

SEQ ID NO: 1697 - DNA, 21 bp, Zea mays
tgtgggggaggcgagggatgg

SEQ ID NO: 1698 - DNA, 21 bp, Zea mays
gcttacatctagtatctgctt

SEQ ID NO: 1699 - DNA, 21 bp, Zea mays
gtcgaagacctcatagtgcca

SEQ ID NO: 1700 - DNA, 21 bp, Zea mays
cccgtgcgttgcaacggaacc

SEQ ID NO: 1701 - DNA, 21 bp, Zea mays
gaccgaattccgtccacgccc

SEQ ID NO: 1702 - DNA, 21 bp, Zea mays
tgatgctgcggtagtggtcct

SEQ ID NO: 1703 - DNA, 21 bp, Zea mays
gtttgggatggctacaggttc

SEQ ID NO: 1704 - DNA, 21 bp, Zea mays
gacactcggcaaagactttgt

SEQ ID NO: 1705 - DNA, 21 bp, Zea mays
actaggtgagtgcctgtgcgt

SEQ ID NO: 1706 - DNA, 21 bp, Zea mays
atggaccccacctgtaggcgc

SEQ ID NO: 1707 - DNA, 21 bp, Zea mays
acagcctatggcgccgaggta

SEQ ID NO: 1708 - DNA, 21 bp, Zea mays
gttgagcgactccgacgattt

SEQ ID NO: 1709 - DNA, 21 bp, Zea mays
cagcaaaactgagggcaccag

SEQ ID NO: 1710 - DNA, 21 bp, Zea mays
cagccagcagaacaagaccca

SEQ ID NO: 1711 - DNA, 21 bp, Zea mays
aggccttgttcgtttgtgtca

SEQ ID NO: 1712 - DNA, 21 bp, Zea mays
tagcctatggcgccgaggtac

SEQ ID NO: 1713 - DNA, 21 bp, Zea mays
cggctgacaaccgacgggttt

SEQ ID NO: 1714 - DNA, 21 bp, Zea mays
ataggagttccgtagttattg

SEQ ID NO: 1715 - DNA, 21 bp, Zea mays
cttgctgagttgctcgacggg

SEQ ID NO: 1716 - DNA, 21 bp, Zea mays
cagcccctcacaaaaatgagg

SEQ ID NO: 1717 - DNA, 21 bp, Zea mays
gtcgctctaaatcgctacagg

SEQ ID NO: 1718 - DNA, 21 bp, Zea mays
tggcactcggcaaagaaagct

SEQ ID NO: 1719 - DNA, 21 bp, Zea mays
tttgcgtggcactcggcaaag

SEQ ID NO: 1720 - DNA, 21 bp, Zea mays
gatgcttccatcatcacagct

SEQ ID NO: 1721 - DNA, 21 bp, Zea mays
tgggctgatttggtgaccagg

SEQ ID NO: 1722 - DNA, 21 bp, Zea mays
atgtgaccgttgatggacatg

SEQ ID NO: 1723 - DNA, 21 bp, Zea mays
aaatgacttgagaggtgtagg

SEQ ID NO: 1724 - DNA, 21 bp, Zea mays
aggcactcggcaaagaagttt

SEQ ID NO: 1725 - DNA, 21 bp, Zea mays
acgtctttgccgagtgtctga

SEQ ID NO: 1726 - DNA, 21 bp, Zea mays
cagacactcggcaaagacgtc

SEQ ID NO: 1727 - DNA, 21 bp, Zea mays
cgtccacgcccggtcgtactc

SEQ ID NO: 1728 - DNA, 21 bp, Zea mays
tcggcaaagtcctgctctcgg

SEQ ID NO: 1729 - DNA, 21 bp, Zea mays
tagggctagtttgggagccgt

SEQ ID NO: 1730 - DNA, 21 bp, Zea mays
ttctttgccgagtgccaccca

SEQ ID NO: 1731 - DNA, 21 bp, Zea mays
agcctttgccgagtgtccccg

SEQ ID NO: 1732 - DNA, 21 bp, Zea mays
taagcttatgtccgacggctg

SEQ ID NO: 1733 - DNA, 21 bp, Zea mays
gtcggaccaagattccacgat

SEQ ID NO: 1734 - DNA, 21 bp, Zea mays
gttggggtcatcacaggccgc

SEQ ID NO: 1735 - DNA, 21 bp, Zea mays
cagaagaatagacgaccagcc

SEQ ID NO: 1736 - DNA, 21 bp, Zea mays
gtctgtgcgttgcaacggaga

SEQ ID NO: 1737 - DNA, 21 bp, Zea mays
acctcatcgacggagaccgtg

SEQ ID NO: 1738 - DNA, 21 bp, Zea mays
gccggatttcggcggaccatt

SEQ ID NO: 1739 - DNA, 21 bp, Zea mays
gcgatgatgctcgctggggct

SEQ ID NO: 1740 - DNA, 21 bp, Zea mays
gtgtaagcctgaatgacttga

SEQ ID NO: 1741 - DNA, 21 bp, Zea mays
ggagactctggcggtcacgtc

SEQ ID NO: 1742 - DNA, 21 bp, Zea mays
tgcgctaacagacgtggggca

SEQ ID NO: 1743 - DNA, 21 bp, Zea mays
gagactttgccgagtgtttgg

SEQ ID NO: 1744 - DNA, 21 bp, Zea mays
gcgtgggacgggcttagcacc

SEQ ID NO: 1745 - DNA, 21 bp, Zea mays
ggcgtcccaggcctccttgaa

SEQ ID NO: 1746 - DNA, 21 bp, Zea mays
gaagatcgggcatcgtgacac

SEQ ID NO: 1747 - DNA, 21 bp, Zea mays
ccatagatcttggcgccgaga

SEQ ID NO: 1748 - DNA, 21 bp, Zea mays
gccaagatctatggcgtcgag

SEQ ID NO: 1749 - DNA, 21 bp, Zea mays
caagcggcagaagcgggacca

SEQ ID NO: 1750 - DNA, 21 bp, Zea mays
ctcgcgcagtggctattgcac

SEQ ID NO: 1751 - DNA, 21 bp, Zea mays
acactcggcaaagactttatc

SEQ ID NO: 1752 - DNA, 21 bp, Zea mays
gactttgtgtgcggtgtggcc

SEQ ID NO: 1753 - DNA, 21 bp, Zea mays
tgcttggactttggatcgctg

SEQ ID NO: 1754 - DNA, 21 bp, Zea mays
acagcctatggcgccgaggtt

SEQ ID NO: 1755 - DNA, 21 bp, Zea mays
tagggctagtttgggagccta

SEQ ID NO: 1756 - DNA, 21 bp, Zea mays
gctgatttggtgaccagagat

SEQ ID NO: 1757 - DNA, 21 bp, Zea mays
ttgcagcggaaatcttattac

SEQ ID NO: 1758 - DNA, 21 bp, Zea mays
cgtgggtacccacgttcttcg

SEQ ID NO: 1759 - DNA, 21 bp, Zea mays
ccttgaccctgactctgtacc

SEQ ID NO: 1760 - DNA, 21 bp, Zea mays
attctagtttgcagccgtctg

SEQ ID NO: 1761 - DNA, 21 bp, Zea mays
gattgaccacacctgtaggtt

SEQ ID NO: 1762 - DNA, 21 bp, Zea mays
gcttctttgccgagtgtctga

SEQ ID NO: 1763 - DNA, 21 bp, Zea mays
acagcctatggcgccgaaatc

SEQ ID NO: 1764 - DNA, 21 bp, Zea mays
cagacactcggcaaagaagcc

SEQ ID NO: 1765 - DNA, 21 bp, Zea mays
ctggcactcgacaaagagtat

SEQ ID NO: 1766 - DNA, 21 bp, Zea mays
tttctttgccgagtgccctac

SEQ ID NO: 1767 - DNA, 21 bp, Zea mays
acgacgaagctgggcgagctc

SEQ ID NO: 1768 - DNA, 21 bp, Zea mays
gaaggccgaagaggagaaagg

SEQ ID NO: 1769 - DNA, 21 bp, Zea mays
caagcgctcgacaaattgctt

SEQ ID NO: 1770 - DNA, 21 bp, Zea mays
ttttacatcacaggcggttca

SEQ ID NO: 1771 - DNA, 21 bp, Zea mays
tagtccctagaaaccaaacgt

SEQ ID NO: 1772 - DNA, 21 bp, Zea mays
ctttgccgagtgccagcaatc

SEQ ID NO: 1773 - DNA, 21 bp, Zea mays
cgtgacgtaagccaacgagcg

SEQ ID NO: 1774 - DNA, 21 bp, Zea mays
ggcaaagtgtggcaagttagc

SEQ ID NO: 1775 - DNA, 21 bp, Zea mays
actccctcgggatgactgcgt

SEQ ID NO: 1776 - DNA, 21 bp, Zea mays
gtgacactcggcaaagagatt

SEQ ID NO: 1777 - DNA, 21 bp, Zea mays
acctcagttgccacatttgcc

SEQ ID NO: 1778 - DNA, 21 bp, Zea mays
gaagagttgcctactcctcca

SEQ ID NO: 1779 - DNA, 21 bp, Zea mays
aggccttgttcgtttctaccg

SEQ ID NO: 1780 - DNA, 21 bp, Zea mays
aaaagcactcggcaaagccgc

SEQ ID NO: 1781 - DNA, 21 bp, Zea mays
gacggcgacagagtggacgga

SEQ ID NO: 1782 - DNA, 21 bp, Zea mays
gcttctttgccgagtgtccgg

SEQ ID NO: 1783 - DNA, 21 bp, Zea mays
cagcactccgcatgcggctcc

SEQ ID NO: 1784 - DNA, 21 bp, Zea mays
aaaagcactcggcaaagagct

SEQ ID NO: 1785 - DNA, 21 bp, Zea mays
actcgacaaagcgccctacag

SEQ ID NO: 1786 - DNA, 21 bp, Zea mays
gtggctaagaggggaggttct

SEQ ID NO: 1787 - DNA, 21 bp, Zea mays
tggctctcggcaaagactctc

SEQ ID NO: 1788 - DNA, 21 bp, Zea mays
aaggctctcggcaaagacgtc

SEQ ID NO: 1789 - DNA, 21 bp, Zea mays
acaaagacgtctttgccgaga

SEQ ID NO: 1790 - DNA, 21 bp, Zea mays
ggaccaggtccagacgtctat

SEQ ID NO: 1791 - DNA, 21 bp, Zea mays
gctaacttcctagaggcggtc

SEQ ID NO: 1792 - DNA, 21 bp, Zea mays
tcggcgtggctaaggttgtaa

SEQ ID NO: 1793 - DNA, 21 bp, Zea mays
aatcatcgcgtgcgttgactt

SEQ ID NO: 1794 - DNA, 21 bp, Zea mays
aaaagcactcggcaaagcgcc

SEQ ID NO: 1795 - DNA, 21 bp, Zea mays
cggcactcggcaaagccggat

SEQ ID NO: 1796 - DNA, 21 bp, Zea mays
agctgccaggagtaagtacgc

SEQ ID NO: 1797 - DNA, 21 bp, Zea mays
taggatgtgtttggttgggga

SEQ ID NO: 1798 - DNA, 21 bp, Zea mays
gacactcggcaaagactttgg

SEQ ID NO: 1799 - DNA, 21 bp, Zea mays
tgttttgccgagtgcctccta

SEQ ID NO: 1800 - DNA, 21 bp, Zea mays
agcctttgccgagtgtcacca

SEQ ID NO: 1801 - DNA, 21 bp, Zea mays
taggcgagtcgtgactgcgcc

SEQ ID NO: 1802 - DNA, 21 bp, Zea mays
gaaacgaacaaggcctaagtt

SEQ ID NO: 1803 - DNA, 21 bp, Zea mays
cactcggcaaagaacccgcta

SEQ ID NO: 1804 - DNA, 21 bp, Zea mays
gacggctatactgacagccat

SEQ ID NO: 1805 - DNA, 21 bp, Zea mays
aagcacttgagcagccatatt

SEQ ID NO: 1806 - DNA, 21 bp, Zea mays
gcctcgggcgactactctggg

SEQ ID NO: 1807 - DNA, 21 bp, Zea mays
agcaacgaccgtcgtcccagc

SEQ ID NO: 1808 - DNA, 21 bp, Zea mays
cgcatgcggccacgtaggact

SEQ ID NO: 1809 - DNA, 21 bp, Zea mays
ttatgtccgacggctttcaga

SEQ ID NO: 1810 - DNA, 21 bp, Zea mays
aaacgaacaaggcctaagcca

SEQ ID NO: 1811 - DNA, 21 bp, Zea mays
acctacagcggcaggaatggc

SEQ ID NO: 1812 - DNA, 21 bp, Zea mays
gccaagatctatggcgcatga

SEQ ID NO: 1813 - DNA, 21 bp, Zea mays
ctcgggtgcgcatgagtaagg

SEQ ID NO: 1814 - DNA, 21 bp, Zea mays
acctcagttgccacattttgc

SEQ ID NO: 1815 - DNA, 21 bp, Zea mays
tttgccgagtgccgccgtgac

SEQ ID NO: 1816 - DNA, 21 bp, Zea mays
gccgcctctaggaagttagcg

SEQ ID NO: 1817 - DNA, 21 bp, Zea mays
gctaacttcctagaggcggcc

SEQ ID NO: 1818 - DNA, 21 bp, Zea mays
cgcactcggcaaagaacctat

SEQ ID NO: 1819 - DNA, 21 bp, Zea mays
gcggtgtcatggttgttctgg

SEQ ID NO: 1820 - DNA, 21 bp, Zea mays
atcgtcggggtagcttttgtg

SEQ ID NO: 1821 - DNA, 21 bp, Zea mays
acagccgtcggacataatgga

SEQ ID NO: 1822 - DNA, 21 bp, Zea mays
aggccttgttcgtttctgctg

SEQ ID NO: 1823 - DNA, 21 bp, Zea mays
ctgagcccggaggacttggaa

SEQ ID NO: 1824 - DNA, 21 bp, Zea mays
gcttctttgccgagtgtcatc

SEQ ID NO: 1825 - DNA, 21 bp, Zea mays
tttggacccttagctcggcgc

SEQ ID NO: 1826 - DNA, 21 bp, Zea mays
gcttctttgccgagtgtccca

SEQ ID NO: 1827 - DNA, 21 bp, Zea mays
ctttgccgagtgccagctggt

SEQ ID NO: 1828 - DNA, 21 bp, Zea mays
cagaccgtcggacataatctt

SEQ ID NO: 1829 - DNA, 21 bp, Zea mays
acgcagtcacgactcgcctga

SEQ ID NO: 1830 - DNA, 21 bp, Zea mays
gtgatagtcttttggatgatt

SEQ ID NO: 1831 - DNA, 21 bp, Zea mays
cgagcagtcatcggacagcgg

SEQ ID NO: 1832 - DNA, 21 bp, Zea mays
agccttctttgccgagtgttg

SEQ ID NO: 1833 - DNA, 21 bp, Zea mays
ttggtcaaccaatccattcct

SEQ ID NO: 1834 - DNA, 21 bp, Zea mays
agctcagctcaggagtgatcc

SEQ ID NO: 1835 - DNA, 21 bp, Zea mays
gatgtggctcggcaacgataa

SEQ ID NO: 1836 - DNA, 21 bp, Zea mays
gcgatctgattggtccacgtg

SEQ ID NO: 1837 - DNA, 21 bp, Zea mays
cccgtgcgttgcgacggcacg

SEQ ID NO: 1838 - DNA, 21 bp, Zea mays
aagacgaagctagcagcgtga

SEQ ID NO: 1839 - DNA, 21 bp, Zea mays
gaggaggccgtagaaagttag

SEQ ID NO: 1840 - DNA, 21 bp, Zea mays
ccgtgtgaagcagaccgcccg

SEQ ID NO: 1841 - DNA, 21 bp, Zea mays
ttatgtccgacggctttcctg

SEQ ID NO: 1842 - DNA, 21 bp, Zea mays
atctccagagccaggctccca

SEQ ID NO: 1843 - DNA, 21 bp, Zea mays
aaggccttgttcgtttgcatc

SEQ ID NO: 1844 - DNA, 21 bp, Zea mays
ccgtgtctatgactggtggga

SEQ ID NO: 1845 - DNA, 21 bp, Zea mays
agtgcctaagtcacgcctcag

SEQ ID NO: 1846 - DNA, 21 bp, Zea mays
agccttctttgccgagtgtca

SEQ ID NO: 1847 - DNA, 21 bp, Zea mays
gtcagcagatcacgagcagtc

SEQ ID NO: 1848 - DNA, 21 bp, Zea mays
tccacgtgcggctggactgtg

SEQ ID NO: 1849 - DNA, 21 bp, Zea mays
acctcagttgccacactttgt

SEQ ID NO: 1850 - DNA, 21 bp, Zea mays
atggctttgttggagaggtga

SEQ ID NO: 1851 - DNA, 21 bp, Zea mays
gtgagccgtcgcaacgcacgg

SEQ ID NO: 1852 - DNA, 21 bp, Zea mays
caaaagcccatataagtggat

SEQ ID NO: 1853 - DNA, 21 bp, Zea mays
gctgactgtagcccctaggaa

SEQ ID NO: 1854 - DNA, 21 bp, Zea mays
aaaacactcggcaaagagcca

SEQ ID NO: 1855 - DNA, 21 bp, Zea mays
ctgcttgcctgctgctgaaat

SEQ ID NO: 1856 - DNA, 21 bp, Zea mays
gattagtgggttgtcgccaga

SEQ ID NO: 1857 - DNA, 21 bp, Zea mays
acttcgccagtgcttatcaac

SEQ ID NO: 1858 - DNA, 21 bp, Zea mays
cttccgtacaatgtgctcgcg

SEQ ID NO: 1859 - DNA, 21 bp, Zea mays
acagacacgtcatgccggctt

SEQ ID NO: 1860 - DNA, 21 bp, Zea mays
aaccgaacaaggcctaaatgg

SEQ ID NO: 1861 - DNA, 21 bp, Zea mays
gtgtcaaaaacaggtggtggc

SEQ ID NO: 1862 - DNA, 21 bp, Zea mays
cgtgggtacccacgttctgaa

SEQ ID NO: 1863 - DNA, 21 bp, Zea mays
ggcaaagactttgccgagggg

SEQ ID NO: 1864 - DNA, 21 bp, Zea mays
agagtgactccataaaccaat

SEQ ID NO: 1865 - DNA, 21 bp, Zea mays
cagacactcggcaaagagtct

SEQ ID NO: 1866 - DNA, 21 bp, Zea mays
taggctgtctccagcaacgtc

SEQ ID NO: 1867 - DNA, 21 bp, Zea mays
aagggtgcgtttggttgaatg

SEQ ID NO: 1868 - DNA, 21 bp, Zea mays
agatcttggcgccgagctacc

SEQ ID NO: 1869 - DNA, 21 bp, Zea mays
atgaacttgtgagcgtctgag

SEQ ID NO: 1870 - DNA, 21 bp, Zea mays
caaagactttgccgagtgtca

SEQ ID NO: 1871 - DNA, 21 bp, Zea mays
acgcgatcgaacacgtggagg

SEQ ID NO: 1872 - DNA, 21 bp, Zea mays
gtgacacagttagccacaaac

SEQ ID NO: 1873 - DNA, 21 bp, Zea mays
gtgacactcggcaaagagtct

SEQ ID NO: 1874 - DNA, 21 bp, Zea mays
gggaccctgttgtgagtggcc

SEQ ID NO: 1875 - DNA, 21 bp, Zea mays
aagcactcggcaaagaacctg

SEQ ID NO: 1876 - DNA, 21 bp, Zea mays
gaaagtcaaacgcttgatatg

SEQ ID NO: 1877 - DNA, 21 bp, Zea mays
cccccccccccccccccaaaa

SEQ ID NO: 1878 - DNA, 21 bp, Zea mays
aaacacgactgagtgcagtgc

SEQ ID NO: 1879 - DNA, 21 bp, Zea mays
gccaagatctatgacgctgat

SEQ ID NO: 1880 - DNA, 21 bp, Zea mays
agatcttggcgccgagctagc

SEQ ID NO: 1881 - DNA, 21 bp, Zea mays
caagtccgactcaactttgcc

SEQ ID NO: 1882 - DNA, 21 bp, Zea mays
cagcagcgtcccctaaattcg

SEQ ID NO: 1883 - DNA, 21 bp, Zea mays
agagagagacagacagacaga

SEQ ID NO: 1884 - DNA, 21 bp, Zea mays
ccatagatcttggcgcctacc

SEQ ID NO: 1885 - DNA, 21 bp, Zea mays
gccaagatctatggcgcctaa

SEQ ID NO: 1886 - DNA, 21 bp, Zea mays
ggcggtctggcgaagtgtgat

SEQ ID NO: 1887 - DNA, 21 bp, Zea mays
caggactttgccgagtgcggc

SEQ ID NO: 1888 - DNA, 21 bp, Zea mays
tttctttgccgagtgcccgcg

SEQ ID NO: 1889 - DNA, 21 bp, Zea mays
caagatctgtggcgccaagct

SEQ ID NO: 1890 - DNA, 21 bp, Zea mays
gtgccacagatcttggtgcca

SEQ ID NO: 1891 - DNA, 21 bp, Zea mays
gcaacgacttcatacggcggg

SEQ ID NO: 1892 - DNA, 21 bp, Zea mays
ggggccgtcggacataagcgc

SEQ ID NO: 1893 - DNA, 21 bp, Zea mays
atagtgccgtgcctaatagtg

SEQ ID NO: 1894 - DNA, 21 bp, Zea mays
tgctcgacaaggacctaatcg

SEQ ID NO: 1895 - DNA, 21 bp, Zea mays
tccgacccaccaatccataac

SEQ ID NO: 1896 - DNA, 21 bp, Zea mays
caagttattgggcccacatgc

SEQ ID NO: 1897 - DNA, 21 bp, Zea mays
ctggcatgtgtctgggaagcg

SEQ ID NO: 1898 - DNA, 21 bp, Zea mays
caagttattgggcccacgtac

SEQ ID NO: 1899 - DNA, 21 bp, Zea mays
ggggccgtcggacataagacg

SEQ ID NO: 1900 - DNA, 21 bp, Zea mays
aatcggggtggagcgtaaaaa

SEQ ID NO: 1901 - DNA, 21 bp, Zea mays
tccaatcaggatctcggtaga

SEQ ID NO: 1902 - DNA, 21 bp, Zea mays
cagacgtagggcggctatccc

SEQ ID NO: 1903 - DNA, 21 bp, Zea mays
gagctgagctggttcctgtca

SEQ ID NO: 1904 - DNA, 21 bp, Zea mays
caagttattgggtccacatgt

SEQ ID NO: 1905 - DNA, 21 bp, Zea mays
ggggccgtcggacataaggct

SEQ ID NO: 1906 - DNA, 21 bp, Zea mays
aggcgtcctcagcgacggact

SEQ ID NO: 1907 - DNA, 21 bp, Zea mays
tgcccgtgcgttgcaacgaga

SEQ ID NO: 1908 - DNA, 21 bp, Zea mays
actttaccgagtgcggctctc

SEQ ID NO: 1909 - DNA, 21 bp, Zea mays
caagatgcagttggtggacga

SEQ ID NO: 1910 - DNA, 21 bp, Zea mays
ccaagaggaggaccaggagca

SEQ ID NO: 1911 - DNA, 21 bp, Zea mays
cctgacatgtgggcccatgaa

SEQ ID NO: 1912 - DNA, 21 bp, Zea mays
ctctgccaccgtagaccggcc

SEQ ID NO: 1913 - DNA, 21 bp, Zea mays
gaacagggcctaaggggagtc

SEQ ID NO: 1914 - DNA, 21 bp, Zea mays
gcctcggtttgctgcgtggac

SEQ ID NO: 1915 - DNA, 21 bp, Zea mays
ggacggtcgagtgggatggag

SEQ ID NO: 1916 - DNA, 21 bp, Zea mays
agctgtccacgaggaagacca

SEQ ID NO: 1917 - DNA, 21 bp, Zea mays
agcactcggcaaagggaccga

SEQ ID NO: 1918 - DNA, 21 bp, Zea mays
ctggtgcgggtgcctctcggt

SEQ ID NO: 1919 - DNA, 21 bp, Zea mays
gtgaagatcgggcatcgtgac

SEQ ID NO: 1920 - DNA, 21 bp, Zea mays
tatcgggcactcggcaaagaa

SEQ ID NO: 1921 - DNA, 21 bp, Zea mays
gcttatgtccgacggtcttct

SEQ ID NO: 1922 - DNA, 21 bp, Zea mays
cgataccagctgtggcggaac

SEQ ID NO: 1923 - DNA, 21 bp, Zea mays
gtgacactcgacaaagaatat

SEQ ID NO: 1924 - DNA, 21 bp, Zea mays
ttggttgcaatgacaggacag

SEQ ID NO: 1925 - DNA, 21 bp, Zea mays
cgttgcagcgatggcggccag

SEQ ID NO: 1926 - DNA, 21 bp, Zea mays
ttgctccggcacgaggatgta

SEQ ID NO: 1927 - DNA, 21 bp, Zea mays
gcttggatcacgtctctgtgg

SEQ ID NO: 1928 - DNA, 21 bp, Zea mays
acaaaccaaacaagcccttac

SEQ ID NO: 1929 - DNA, 21 bp, Zea mays
tctcggacgggcctggctgcg

SEQ ID NO: 1930 - DNA, 21 bp, Zea mays
gctagcactcggcaaaggcga

SEQ ID NO: 1931 - DNA, 21 bp, Zea mays
gctagcactcggcaaagtcgc

SEQ ID NO: 1932 - DNA, 21 bp, Zea mays
ctgggatttggacgttgttgc

SEQ ID NO: 1933 - DNA, 21 bp, Zea mays
gaagctgctgggtggcgaagc

SEQ ID NO: 1934 - DNA, 21 bp, Zea mays
cgttgctgggcgcgttgagga

SEQ ID NO: 1935 - DNA, 21 bp, Zea mays
gtcgtccgtcctgagtccaat

SEQ ID NO: 1936 - DNA, 21 bp, Zea mays
ttgcaacgcacgggcactgag

SEQ ID NO: 1937 - DNA, 21 bp, Zea mays
caggcactcggcaaagaggct

SEQ ID NO: 1938 - DNA, 21 bp, Zea mays
gcaaacgaccttcgggctggg

SEQ ID NO: 1939 - DNA, 21 bp, Zea mays
cagcacgagcacgacccgaaa

SEQ ID NO: 1940 - DNA, 21 bp, Zea mays
ggttggtcacctggctgctct

SEQ ID NO: 1941 - DNA, 21 bp, Zea mays
ttctttgccgagtgccggatc

SEQ ID NO: 1942 - DNA, 21 bp, Zea mays
ctctttgccgagtgccagatg

SEQ ID NO: 1943 - DNA, 21 bp, Zea mays
cgtgctcgggctagcccaacg

SEQ ID NO: 1944 - DNA, 21 bp, Zea mays
tgcaggcacgcacctcacatc

SEQ ID NO: 1945 - DNA, 21 bp, Zea mays
ggggaaccgctgcgggagatg

SEQ ID NO: 1946 - DNA, 21 bp, Zea mays
tgcgtttggttgcgggtcagc

SEQ ID NO: 1947 - DNA, 21 bp, Zea mays
gtgctcgtgcgtcacaggccc

SEQ ID NO: 1948 - DNA, 21 bp, Zea mays
cgaactcgaggtggcgccgct

SEQ ID NO: 1949 - DNA, 21 bp, Zea mays
aggagcccgacgtctgctcga

SEQ ID NO: 1950 - DNA, 21 bp, Zea mays
ttctttgccgagtgccgtgtt

SEQ ID NO: 1951 - DNA, 21 bp, Zea mays
aagcacgagcaactggctagt

SEQ ID NO: 1952 - DNA, 21 bp, Zea mays
gttccaggagtgctccaggtc

SEQ ID NO: 1953 - DNA, 21 bp, Zea mays
tttctttgccgagtgcacgag

SEQ ID NO: 1954 - DNA, 21 bp, Zea mays
tccggtgaagtggtcgaggac

SEQ ID NO: 1955 - DNA, 21 bp, Zea mays
ggcgattccacggctaggttc

SEQ ID NO: 1956 - DNA, 21 bp, Zea mays
cgggcactcggcaaagatctg

SEQ ID NO: 1957 - DNA, 21 bp, Zea mays
cgaggctgaggccgagctgct

SEQ ID NO: 1958 - DNA, 21 bp, Zea mays
agcaaaacgcttaggcccctc

SEQ ID NO: 1959 - DNA, 21 bp, Zea mays
gacactcggcaaagaagcttt

SEQ ID NO: 1960 - DNA, 21 bp, Zea mays
gaggacaaagtgcgcacaaaa

SEQ ID NO: 1961 - DNA, 21 bp, Zea mays
gaccctcgcggtttcacgggc

SEQ ID NO: 1962 - DNA, 21 bp, Zea mays
tgagcgatttggcggcggtgg

SEQ ID NO: 1963 - DNA, 21 bp, Zea mays
gcagcggtgcggcttcaggcg

SEQ ID NO: 1964 - DNA, 21 bp, Zea mays
ctctttgccgagtgccaaatg

SEQ ID NO: 1965 - DNA, 21 bp, Zea mays
gcctcgctgggttgctcagca

SEQ ID NO: 1966 - DNA, 21 bp, Zea mays
caggcactcggcaaagaagtt

SEQ ID NO: 1967 - DNA, 21 bp, Zea mays
cccggtggcagggtggtaggc

SEQ ID NO: 1968 - DNA, 21 bp, Zea mays
caccacctgctgcttgaccga

SEQ ID NO: 1969 - DNA, 21 bp, Zea mays
catacggttatgtccgacggc

SEQ ID NO: 1970 - DNA, 21 bp, Zea mays
tgtactgacccttgccaccgg

SEQ ID NO: 1971 - DNA, 21 bp, Zea mays
ctggtgcgggtgcctcttggt

SEQ ID NO: 1972 - DNA, 21 bp, Zea mays
tccacggtctgagccgccagc

SEQ ID NO: 1973 - DNA, 21 bp, Zea mays
cgtggaccgagcgattccggc

SEQ ID NO: 1974 - DNA, 21 bp, Zea mays
gttccaggagtgctccaagtc

SEQ ID NO: 1975 - DNA, 21 bp, Zea mays
gacgacgacgacgacgcgccc

SEQ ID NO: 1976 - DNA, 21 bp, Zea mays
gcaaacaaccattaggtgcaa

SEQ ID NO: 1977 - DNA, 21 bp, Zea mays
aacgctgcatgtgcgggagca

SEQ ID NO: 1978 - DNA, 21 bp, Zea mays
ggcgggcgagagggaggcgag

SEQ ID NO: 1979 - DNA, 21 bp, Zea mays
cgggcgagagcgaggcgatac

SEQ ID NO: 1980 - DNA, 21 bp, Zea mays
tgaggagtcgtcggaggagga

SEQ ID NO: 1981 - DNA, 21 bp, Zea mays
ggaagatcgggccgcgtctac

SEQ ID NO: 1982 - DNA, 21 bp, Zea mays
ccctctgggtgagcgcgattt

SEQ ID NO: 1983 - DNA, 21 bp, Zea mays
ctgattggatgaccgcaccca

SEQ ID NO: 1984 - DNA, 21 bp, Zea mays
aggggcgagagtggaggcgag

SEQ ID NO: 1985 - DNA, 21 bp, Zea mays
cctcggtccgcgtgcaagata

SEQ ID NO: 1986 - DNA, 21 bp, Zea mays
aggcgacttttgctcggacgc

SEQ ID NO: 1987 - DNA, 21 bp, Zea mays
tgaaccaaacaggcccttagt

SEQ ID NO: 1988 - DNA, 21 bp, Zea mays
ggactaggcaggcttttgctt

SEQ ID NO: 1989 - DNA, 21 bp, Zea mays
acaagccccgactcttcgcta

SEQ ID NO: 1990 - DNA, 21 bp, Zea mays
gtgtctgagacacacggcaaa

SEQ ID NO: 1991 - DNA, 21 bp, Zea mays
gcagattggtcgcatctctag

SEQ ID NO: 1992 - DNA, 21 bp, Zea mays
caccctaaacactgtgctgtg

SEQ ID NO: 1993 - DNA, 21 bp, Zea mays
atcattggcgggtggctgaga

SEQ ID NO: 1994 - DNA, 21 bp, Zea mays
ccagcggggtgctggttgggc

SEQ ID NO: 1995 - DNA, 21 bp, Zea mays
ggcgcgcaggctgcgagttgc

SEQ ID NO: 1996 - DNA, 21 bp, Zea mays
ggggagtttggctggggcggc

SEQ ID NO: 1997 - DNA, 21 bp, Zea mays
ggacataggttgatgccgtcg

SEQ ID NO: 1998 - DNA, 21 bp, Zea mays
cgccagggccaccctgcagat

SEQ ID NO: 1999 - DNA, 21 bp, Zea mays
ctgacaagcgatgtgccgcct

SEQ ID NO: 2000 - DNA, 21 bp, Zea mays
gactgagtgcagggcgaccag

SEQ ID NO: 2001 - DNA, 21 bp, Zea mays
ctggattaaagccgcagcgaa

SEQ ID NO: 2002 - DNA, 21 bp, Zea mays
gcctcgctgggttgctcagcg

SEQ ID NO: 2003 - DNA, 21 bp, Zea mays
gatgagtaggagggcgcggcg

SEQ ID NO: 2004 - DNA, 21 bp, Zea mays
tttttgacactcggcaaaaag

SEQ ID NO: 2005 - DNA, 21 bp, Zea mays
ctcatgtgcgctgacgcctat

SEQ ID NO: 2006 - DNA, 21 bp, Zea mays
cttccgcaggagaggaccagg

SEQ ID NO: 2007 - DNA, 21 bp, Zea mays
cataaagtagcgcgtgcacct

SEQ ID NO: 2008 - DNA, 21 bp, Zea mays
cttgaccatgggagccagcga

SEQ ID NO: 2009 - DNA, 21 bp, Zea mays
cgttcccggttgcaactcgat

SEQ ID NO: 2010 - DNA, 21 bp, Zea mays
tttttgacactcggcaaagaa

SEQ ID NO: 2011 - DNA, 21 bp, Zea mays
cccgacctcgacgtgcggtgg

SEQ ID NO: 2012 - DNA, 21 bp, Zea mays
cgtcgtcctcctggtgtggct

SEQ ID NO: 2013 - DNA, 21 bp, Zea mays
agggttgtgggccgttggatg

SEQ ID NO: 2014 - DNA, 21 bp, Zea mays
ctctttgccgagtgccagccg

SEQ ID NO: 2015 - DNA, 21 bp, Zea mays
tggacgagcggctgtaaatga

SEQ ID NO: 2016 - DNA, 21 bp, Zea mays
ggcaaagtgtgacaagttatg

SEQ ID NO: 2017 - DNA, 21 bp, Zea mays
catggtcgtcaccgtcgtcct

SEQ ID NO: 2018 - DNA, 21 bp, Zea mays
ccacagatcttggcgccgagc

SEQ ID NO: 2019 - DNA, 21 bp, Zea mays
aggcttcgcaggaccttgtga

SEQ ID NO: 2020 - DNA, 21 bp, Zea mays
cgacgcggcttgcggcggtgg

SEQ ID NO: 2021 - DNA, 21 bp, Zea mays
cgggcactcggcaaagaagtc

SEQ ID NO: 2022 - DNA, 21 bp, Zea mays
gagtcctcgacgcagggccgc

SEQ ID NO: 2023 - DNA, 21 bp, Zea mays
gccgaacgcgacccagatcac

SEQ ID NO: 2024 - DNA, 21 bp, Zea mays
ccacgtatcgtggactgagca

SEQ ID NO: 2025 - DNA, 21 bp, Zea mays
ccgcggacgctgtcgagcccg

SEQ ID NO: 2026 - DNA, 21 bp, Zea mays
gtggattgggtgggattgagt

SEQ ID NO: 2027 - DNA, 21 bp, Zea mays
gacactcggcaaagaagtaat

SEQ ID NO: 2028 - DNA, 21 bp, Zea mays
cctactgctgttgggagggtt

SEQ ID NO: 2029 - DNA, 21 bp, Zea mays
ctactgccgccgataagcccc

SEQ ID NO: 2030 - DNA, 21 bp, Zea mays
ctgtagggcgaagacgcggtc

SEQ ID NO: 2031 - DNA, 21 bp, Zea mays
ccagccagagcgcctgagtca

SEQ ID NO: 2032 - DNA, 21 bp, Zea mays
gctgtccaccctgagttccac

SEQ ID NO: 2033 - DNA, 21 bp, Zea mays
gatgttcgagcgagcgatgtc

SEQ ID NO: 2034 - DNA, 21 bp, Zea mays
ggtatagagtgccttgctggg

SEQ ID NO: 2035 - DNA, 21 bp, Zea mays
caggccttgttcgtttgtgtc

SEQ ID NO: 2036 - DNA, 21 bp, Zea mays
aggcgacttttgctcggatga

SEQ ID NO: 2037 - DNA, 21 bp, Zea mays
gtggcagggtggtaggccaag

SEQ ID NO: 2038 - DNA, 21 bp, Zea mays
tccaatcccggaggcggtagg

SEQ ID NO: 2039 - DNA, 21 bp, Zea mays
ggtgaagcgaagggtgagact

SEQ ID NO: 2040 - DNA, 21 bp, Zea mays
gccaagatctacggcgccgag

SEQ ID NO: 2041 - DNA, 21 bp, Zea mays
cttggcgactgccagttcgac

SEQ ID NO: 2042 - DNA, 21 bp, Zea mays
caaattggcacggcacgacca

SEQ ID NO: 2043 - DNA, 21 bp, Zea mays
tgacggaactgttcgcgggga

SEQ ID NO: 2044 - DNA, 21 bp, Zea mays
aagaaccgcctgtgatagaca

SEQ ID NO: 2045 - DNA, 21 bp, Zea mays
gtgccggtgggctcggccttc

SEQ ID NO: 2046 - DNA, 21 bp, Zea mays
gccatagatcttggcgccgag

SEQ ID NO: 2047 - DNA, 21 bp, Zea mays
ggcgtcgtcgtcggatgtggt

SEQ ID NO: 2048 - DNA, 21 bp, Zea mays
gaaccgaggaaccgaaccgaa

SEQ ID NO: 2049 - DNA, 21 bp, Zea mays
cgctcaggcggagacccgatc

SEQ ID NO: 2050 - DNA, 21 bp, Zea mays
attacgctccggcggcccgaa

SEQ ID NO: 2051 - DNA, 21 bp, Zea mays
aaccgaacaagccctaaggtg

SEQ ID NO: 2052 - DNA, 21 bp, Zea mays
agaacggagccgttccattcc

SEQ ID NO: 2053 - DNA, 21 bp, Zea mays
cttctacgcctagcactacac

SEQ ID NO: 2054 - DNA, 21 bp, Zea mays
ctctgccaccgtagaccggct

SEQ ID NO: 2055 - DNA, 21 bp, Zea mays
tgagtgcccgtgcgttgcaac

SEQ ID NO: 2056 - DNA, 21 bp, Zea mays
cagccaggctacggggagaag

SEQ ID NO: 2057 - DNA, 21 bp, Zea mays
gtgttggtcgattaagacagc

SEQ ID NO: 2058 - DNA, 21 bp, Zea mays
ctctttgccgagtgccaggac

SEQ ID NO: 2059 - DNA, 21 bp, Zea mays
cccttcggtgcgccgccggcc

SEQ ID NO: 2060 - DNA, 21 bp, Zea mays
gtgacgtaagccaacgggcgg

SEQ ID NO: 2061 - DNA, 21 bp, Zea mays
catcacaggcggttcggatag

SEQ ID NO: 2062 - DNA, 21 bp, Zea mays
aagaaccgcctgtgatagtca

SEQ ID NO: 2063 - DNA, 21 bp, Zea mays
aggctctgggccggtggggtc

SEQ ID NO: 2064 - DNA, 21 bp, Zea mays
gaggacggcggcgtgatttgc

SEQ ID NO: 2065 - DNA, 21 bp, Zea mays
ttccttatgtccgacggtttt

SEQ ID NO: 2066 - DNA, 21 bp, Zea mays
cgggcactcggcaaagaagga

SEQ ID NO: 2067 - DNA, 21 bp, Zea mays
gtcagcagggtggacaggcga

SEQ ID NO: 2068 - DNA, 21 bp, Zea mays
cccgtgcgttgcgacggctca

SEQ ID NO: 2069 - DNA, 21 bp, Zea mays
gacactcggcaaagaagctct

SEQ ID NO: 2070 - DNA, 21 bp, Zea mays
actgttggactgcgggtttct

SEQ ID NO: 2071 - DNA, 21 bp, Zea mays
cgaagtctttgccgagtgtga

SEQ ID NO: 2072 - DNA, 21 bp, Zea mays
agcctttgccgagtgtcacgg

SEQ ID NO: 2073 - DNA, 21 bp, Zea mays
cataaagtagcgcgtgcgcct

SEQ ID NO: 2074 - DNA, 21 bp, Zea mays
agggctgatttggtgactaga

SEQ ID NO: 2075 - DNA, 21 bp, Zea mays
agagctgccaggagtaagtat

SEQ ID NO: 2076 - DNA, 21 bp, Zea mays
ggaggcgtaggcgagggatta

SEQ ID NO: 2077 - DNA, 21 bp, Zea mays
cactatgtgttacctcggcgt

SEQ ID NO: 2078 - DNA, 21 bp, Zea mays
gttcgtttccgtcggattggg

SEQ ID NO: 2079 - DNA, 21 bp, Zea mays
gttgccgatgtacagttcgcc

SEQ ID NO: 2080 - DNA, 21 bp, Zea mays
gagaagccagtccacggtcgt

SEQ ID NO: 2081 - DNA, 21 bp, Zea mays
cacagcctatggcgccgagta

SEQ ID NO: 2082 - DNA, 21 bp, Zea mays
aaagcactcggcaaagccccg

SEQ ID NO: 2083 - DNA, 21 bp, Zea mays
gagaagccagtccacggtcgc

SEQ ID NO: 2084 - DNA, 21 bp, Zea mays
gactgagtgcagggcgactag

SEQ ID NO: 2085 - DNA, 21 bp, Zea mays
ttgcaacgcacgggcacccat

SEQ ID NO: 2086 - DNA, 21 bp, Zea mays
tcgcgaaccaaacggcaccta

SEQ ID NO: 2087 - DNA, 21 bp, Zea mays
cgagcactcggcaaagaaccg

SEQ ID NO: 2088 - DNA, 21 bp, Zea mays
cgtgcgttgctacggaatcaa

SEQ ID NO: 2089 - DNA, 21 bp, Zea mays
cctgtgcgacgttggcctgac

SEQ ID NO: 2090 - DNA, 21 bp, Zea mays
cgggcactcggcaaagatgga

SEQ ID NO: 2091 - DNA, 21 bp, Zea mays
cgtggtgcggtggatgcgggg

SEQ ID NO: 2092 - DNA, 21 bp, Zea mays
gataggtcccacccgcaggta

SEQ ID NO: 2093 - DNA, 21 bp, Zea mays
gggggtgtttggtttctgggg

SEQ ID NO: 2094 - DNA, 21 bp, Zea mays
cataggctatggcgctgaggt

SEQ ID NO: 2095 - DNA, 21 bp, Zea mays
gtcgacagtctatggatttgg

SEQ ID NO: 2096 - DNA, 21 bp, Zea mays
cgaaccgcctgtgatgtatta

SEQ ID NO: 2097 - DNA, 21 bp, Zea mays
gtgtcgtgcctgggccatgcg

SEQ ID NO: 2098 - DNA, 21 bp, Zea mays
agatgtctcacggcggcgctg

SEQ ID NO: 2099 - DNA, 21 bp, Zea mays
ccgcgatacggctgatcagca

SEQ ID NO: 2100 - DNA, 21 bp, Zea mays
cgggtcttcggctgcctcgtg

SEQ ID NO: 2101 - DNA, 21 bp, Zea mays
ctctccgcacaagactgcata

SEQ ID NO: 2102 - DNA, 21 bp, Zea mays
gtgaagatcgggcatcgtgat

SEQ ID NO: 2103 - DNA, 21 bp, Zea mays
cgggcactcggcaaagaattt

SEQ ID NO: 2104 - DNA, 21 bp, Zea mays
ccatagcctgtggcgccgagg

SEQ ID NO: 2105 - DNA, 21 bp, Zea mays
atatgcggacgccaaatctag

SEQ ID NO: 2106 - DNA, 21 bp, Zea mays
ggtaccgtcgaacttaacatt

SEQ ID NO: 2107 - DNA, 21 bp, Zea mays
gagcctgacgtaaggcccata

SEQ ID NO: 2108 - DNA, 21 bp, Zea mays
cccggggtcgaaacgccgaca

SEQ ID NO: 2109 - DNA, 21 bp, Zea mays
cctcgttcttggccctatcca

SEQ ID NO: 2110 - DNA, 21 bp, Zea mays
cctgcggcttctgtttgcgac

SEQ ID NO: 2111 - DNA, 21 bp, Zea mays
agtgccggcacgacacgacaa

SEQ ID NO: 2112 - DNA, 21 bp, Zea mays
ggttccagtggattgagcgcc

SEQ ID NO: 2113 - DNA, 21 bp, Zea mays
ggcaaagtgtgacaagttaga

SEQ ID NO: 2114 - DNA, 21 bp, Zea mays
ttgcaacgcacgggcactcaa

SEQ ID NO: 2115 - DNA, 21 bp, Zea mays
ctttgccgagtgccagatcac

SEQ ID NO: 2116 - DNA, 21 bp, Zea mays
gacctctggaagcagtcctac

SEQ ID NO: 2117 - DNA, 21 bp, Zea mays
cacctgccggaaaagtacgat

SEQ ID NO: 2118 - DNA, 21 bp, Zea mays
ctggcattgtgacgtgtggcg

SEQ ID NO: 2119 - DNA, 21 bp, Zea mays
ttgctccggcacgaggacata

SEQ ID NO: 2120 - DNA, 21 bp, Zea mays
gcgagccaggctgtggagaaa

SEQ ID NO: 2121 - DNA, 21 bp, Zea mays
gaacgtgacagcacatgcgac

SEQ ID NO: 2122 - DNA, 21 bp, Zea mays
gctgggtccagcgccaggatc

SEQ ID NO: 2123 - DNA, 21 bp, Zea mays
gtctcaaagacctcagacagc

SEQ ID NO: 2124 - DNA, 21 bp, Zea mays
cgagccagctcgcgagctaaa

SEQ ID NO: 2125 - DNA, 21 bp, Zea mays
gagtgtccgtgcgttacagtg

SEQ ID NO: 2126 - DNA, 21 bp, Zea mays
cgccggctgagggaggcgtcg

SEQ ID NO: 2127 - DNA, 21 bp, Zea mays
cccgtgacataagccagcagg

SEQ ID NO: 2128 - DNA, 21 bp, Zea mays
ccgcgctcggccggtcaggca

SEQ ID NO: 2129 - DNA, 21 bp, Zea mays
cccacttgttgcgggcgcacg

SEQ ID NO: 2130 - DNA, 21 bp, Zea mays
cgaagactcccggagctcggg

SEQ ID NO: 2131 - DNA, 21 bp, Zea mays
agggctgatttggtgacaagt

SEQ ID NO: 2132 - DNA, 21 bp, Zea mays
cgccataggctatggcgccga

SEQ ID NO: 2133 - DNA, 21 bp, Zea mays
gtaacactcggcaaagaagat

SEQ ID NO: 2134 - DNA, 21 bp, Zea mays
gtgaagccgtggtaacaccaa

SEQ ID NO: 2135 - DNA, 21 bp, Zea mays
gtcacactcggcaaagacttc

SEQ ID NO: 2136 - DNA, 21 bp, Zea mays
gttgcaacgcacggacaccca

SEQ ID NO: 2137 - DNA, 21 bp, Zea mays
agagcccaaaaaacccctcat

SEQ ID NO: 2138 - DNA, 21 bp, Zea mays
ctctttgccgagtgtctccct

SEQ ID NO: 2139 - DNA, 21 bp, Zea mays
cgggcactcggcaaagaaggc

SEQ ID NO: 2140 - DNA, 21 bp, Zea mays
ctggcactcggcaaaggaatc

SEQ ID NO: 2141 - DNA, 21 bp, Zea mays
ttctttgccgagtgccacgca

SEQ ID NO: 2142 - DNA, 21 bp, Zea mays
gtgctttgccgagtgtcagga

SEQ ID NO: 2143 - DNA, 21 bp, Zea mays
agccatctttgccgagtgctg

SEQ ID NO: 2144 - DNA, 21 bp, Zea mays
tgggctcgggcgaggcgtagt

SEQ ID NO: 2145 - DNA, 21 bp, Zea mays
ccagccagagcgcctgagtcg

SEQ ID NO: 2146 - DNA, 21 bp, Zea mays
agagtctccccgagccaaccc

SEQ ID NO: 2147 - DNA, 21 bp, Zea mays
tgaaccaaacaggcccttaag

SEQ ID NO: 2148 - DNA, 21 bp, Zea mays
agcaggggcaaaccaaacacc

SEQ ID NO: 2149 - DNA, 21 bp, Zea mays
cgttcctgagcaaccgaacaa

SEQ ID NO: 2150 - DNA, 21 bp, Zea mays
cgctcaggcggagacccaatg

SEQ ID NO: 2151 - DNA, 21 bp, Zea mays
ccacaaaccaaacaggcctta

SEQ ID NO: 2152 - DNA, 21 bp, Zea mays
tcgcgggtatgggtttgtctc

SEQ ID NO: 2153 - DNA, 21 bp, Zea mays
ggagtcggcggatgttgcgag

SEQ ID NO: 2154 - DNA, 21 bp, Zea mays
tcgtgatccattaccacacat

SEQ ID NO: 2155 - DNA, 21 bp, Zea mays
gaatcgctccatccacgaacg

SEQ ID NO: 2156 - DNA, 21 bp, Zea mays
caccaccaggaggagggaacg

SEQ ID NO: 2157 - DNA, 21 bp, Zea mays
gacactcggcaaagaagcccc

SEQ ID NO: 2158 - DNA, 21 bp, Zea mays
ctttgccgagtgccagatcgc

SEQ ID NO: 2159 - DNA, 21 bp, Zea mays
gtagcaacgcacgggcataca

SEQ ID NO: 2160 - DNA, 21 bp, Zea mays
cgcgtcagcacgcgactgtgg

SEQ ID NO: 2161 - DNA, 21 bp, Zea mays
agggctgatttggtgactggg

SEQ ID NO: 2162 - DNA, 21 bp, Zea mays
cactcggcaaagaacctatgc

SEQ ID NO: 2163 - DNA, 21 bp, Zea mays
tggcaggtccgcgcagttgct

SEQ ID NO: 2164 - DNA, 21 bp, Zea mays
actattggagttgctctaata

SEQ ID NO: 2165 - DNA, 21 bp, Zea mays
ggctttttacatcacagacgg

SEQ ID NO: 2166 - DNA, 21 bp, Zea mays
caaagtaggatgagtcggggc

SEQ ID NO: 2167 - DNA, 21 bp, Zea mays
caatccctggaccggcggtac

SEQ ID NO: 2168 - DNA, 21 bp, Zea mays
gttgtgctagtccggctgcac

SEQ ID NO: 2169 - DNA, 21 bp, Zea mays
cgctgactacagggctgccac

SEQ ID NO: 2170 - DNA, 21 bp, Zea mays
tccggtgaagtggtcgagggt

SEQ ID NO: 2171 - DNA, 21 bp, Zea mays
gaagtcgtcgtgctgcgtagc

SEQ ID NO: 2172 - DNA, 21 bp, Zea mays
gctcaggaggtagccccagat

SEQ ID NO: 2173 - DNA, 21 bp, Zea mays
aggagcagctcatgccggatc

SEQ ID NO: 2174 - DNA, 21 bp, Zea mays
gtgtcgtgcctgggccaccat

SEQ ID NO: 2175 - DNA, 21 bp, Zea mays
gtgtctatgacatgtggggca

SEQ ID NO: 2176 - DNA, 21 bp, Zea mays
ggtgcaagcatgcaatcgagc

SEQ ID NO: 2177 - DNA, 21 bp, Zea mays
gacggtcacggcgatgtgcgg

SEQ ID NO: 2178 - DNA, 21 bp, Zea mays
caatccagggagcttcggcat

SEQ ID NO: 2179 - DNA, 21 bp, Zea mays
tccgttgttggagatgccctc

SEQ ID NO: 2180 - DNA, 21 bp, Zea mays
ctctttgccgagtgtcttcca

SEQ ID NO: 2181 - DNA, 21 bp, Zea mays
gccctcggctcactggagtgg

SEQ ID NO: 2182 - DNA, 21 bp, Zea mays
ggccagagttatgcgctgggc

SEQ ID NO: 2183 - DNA, 21 bp, Zea mays
cgtctcgaccggagtctgcct

SEQ ID NO: 2184 - DNA, 21 bp, Zea mays
ttggtgtaaccgaacatgttt

SEQ ID NO: 2185 - DNA, 21 bp, Zea mays
agagctgccaggagtaagtac

SEQ ID NO: 2186 - DNA, 21 bp, Zea mays
tccgcgatatggttgatcggc

SEQ ID NO: 2187 - DNA, 21 bp, Zea mays
cgggaagagcatacctgcaga

SEQ ID NO: 2188 - DNA, 21 bp, Zea mays
caccctcgcgtgcgacactcc

SEQ ID NO: 2189 - DNA, 21 bp, Zea mays
gagcctgacgtaaggcctcgg

SEQ ID NO: 2190 - DNA, 21 bp, Zea mays
gagctgacgttgacgatgacc

SEQ ID NO: 2191 - DNA, 21 bp, Zea mays
agcgtcagcatgttgcgtcca

SEQ ID NO: 2192 - DNA, 21 bp, Zea mays
gggctgaacgggccgtgccta

SEQ ID NO: 2193 - DNA, 21 bp, Zea mays
gggttaggggttcgggtatat

SEQ ID NO: 2194 - DNA, 21 bp, Zea mays
gaagctgctgggtggcgtact

SEQ ID NO: 2195 - DNA, 21 bp, Zea mays
tgcccgtgcgttgcgacggca

SEQ ID NO: 2196 - DNA, 21 bp, Zea mays
tgccaggaggaggtctgcgcc

SEQ ID NO: 2197 - DNA, 21 bp, Zea mays
cgagacttcggatggccacga

SEQ ID NO: 2198 - DNA, 21 bp, Zea mays
gaactggaacaaagcggctct

SEQ ID NO: 2199 - DNA, 21 bp, Zea mays
attgcactcggcaaagacact

SEQ ID NO: 2200 - DNA, 21 bp, Zea mays
tgaaccaaacaggcccttaat

SEQ ID NO: 2201 - DNA, 21 bp, Zea mays
agcgtggactggcttctccgg

SEQ ID NO: 2202 - DNA, 21 bp, Zea mays
cggaaagttgatgagcagcca

SEQ ID NO: 2203 - DNA, 21 bp, Zea mays
gtcgaagcgaaactcgggcaa

SEQ ID NO: 2204 - DNA, 21 bp, Zea mays
cgggactgcagcaatgagggc

SEQ ID NO: 2205 - DNA, 21 bp, Zea mays
tccgaagccatctgccatgga

SEQ ID NO: 2206 - DNA, 21 bp, Zea mays
agaggactgtttagaggacga

SEQ ID NO: 2207 - DNA, 21 bp, Zea mays
ttgcaacgcacgggcacccac

SEQ ID NO: 2208 - DNA, 21 bp, Zea mays
cgagagggaggctgtgcactg

SEQ ID NO: 2209 - DNA, 21 bp, Zea mays
agactcagctagtgcttttgg

SEQ ID NO: 2210 - DNA, 21 bp, Zea mays
attgttaggctaactccagca

SEQ ID NO: 2211 - DNA, 21 bp, Zea mays
cggggattttctcggccggac

SEQ ID NO: 2212 - DNA, 21 bp, Zea mays
acagcactcggcaaagaagct

SEQ ID NO: 2213 - DNA, 21 bp, Zea mays
gaatcgtctgcttctcgcaac

SEQ ID NO: 2214 - DNA, 21 bp, Zea mays
cgggcactcggcaaagacgtt

SEQ ID NO: 2215 - DNA, 21 bp, Zea mays
ctgcatagatgggccggtctt

SEQ ID NO: 2216 - DNA, 21 bp, Zea mays
ggtacaaccgaacgggcccta

SEQ ID NO: 2217 - DNA, 21 bp, Zea mays
gagcctgacgtaaggcccacg

SEQ ID NO: 2218 - DNA, 21 bp, Zea mays
cccctccggttttgtggctcc

SEQ ID NO: 2219 - DNA, 21 bp, Zea mays
agctgaacgatcccttggggc

SEQ ID NO: 2220 - DNA, 21 bp, Zea mays
tcgcgctatctgccgggtttc

SEQ ID NO: 2221 - DNA, 21 bp, Zea mays
gcctactctctggccgacggg

SEQ ID NO: 2222 - DNA, 21 bp, Zea mays
ctccaaaatcgccgtccgcag

SEQ ID NO: 2223 - DNA, 21 bp, Zea mays
gtctttgccgagtgcttgtca

SEQ ID NO: 2224 - DNA, 21 bp, Zea mays
ctctttgccgagtgccacgca

SEQ ID NO: 2225 - DNA, 21 bp, Zea mays
gactgagtgcagggcgactgg

SEQ ID NO: 2226 - DNA, 21 bp, Zea mays
gccaatgatgatgacgccgag

SEQ ID NO: 2227 - DNA, 21 bp, Zea mays
ggcactcggcaaagaagtttc

SEQ ID NO: 2228 - DNA, 21 bp, Zea mays
ctctttgccgagtgtctagat

SEQ ID NO: 2229 - DNA, 21 bp, Zea mays
gcctcgtacagggccgtcgga

SEQ ID NO: 2230 - DNA, 21 bp, Zea mays
cggcgaagggtggggttggct

SEQ ID NO: 2231 - DNA, 21 bp, Zea mays
tgcccgtgcgttgcaacgggt

SEQ ID NO: 2232 - DNA, 21 bp, Zea mays
tgagctcgctcgactcgtagt

SEQ ID NO: 2233 - DNA, 21 bp, Zea mays
tcttttgactgcaaggacagc

SEQ ID NO: 2234 - DNA, 21 bp, Zea mays
ggtaccgtcgaacttaatgtg

SEQ ID NO: 2235 - DNA, 21 bp, Zea mays
ggccctagggcggttgaaccg

SEQ ID NO: 2236 - DNA, 21 bp, Zea mays
gaagctgctgggtggcgaacc

SEQ ID NO: 2237 - DNA, 21 bp, Zea mays
gtcagcagggtggacagacgg

SEQ ID NO: 2238 - DNA, 21 bp, Zea mays
gcaggctgttgatcgcttgga

SEQ ID NO: 2239 - DNA, 21 bp, Zea mays
cagcccagaaccggcacgacc

SEQ ID NO: 2240 - DNA, 21 bp, Zea mays
ctggcactcggcaaagggagc

SEQ ID NO: 2241 - DNA, 21 bp, Zea mays
acacaaacgaacaaggccatg

SEQ ID NO: 2242 - DNA, 21 bp, Zea mays
caggagtaagtaccgccggtc

SEQ ID NO: 2243 - DNA, 21 bp, Zea mays
tggtggtccggtggcgcaacc

SEQ ID NO: 2244 - DNA, 21 bp, Zea mays
gaggccgccaaggcggaaggt

SEQ ID NO: 2245 - DNA, 21 bp, Zea mays
gctgtccaccctgagtttcca

SEQ ID NO: 2246 - DNA, 21 bp, Zea mays
aggacttagggcgggtgcact

SEQ ID NO: 2247 - DNA, 21 bp, Zea mays
tgtgaggggctgcaaacattc

SEQ ID NO: 2248 - DNA, 21 bp, Zea mays
gccatagatcttggcgccaaa

SEQ ID NO: 2249 - DNA, 21 bp, Zea mays
gatggccaaacggcggtccgg

SEQ ID NO: 2250 - DNA, 21 bp, Zea mays
gcatactgcagtaccgtgcgg

SEQ ID NO: 2251 - DNA, 21 bp, Zea mays
ctctggcactcggcaaagtag

SEQ ID NO: 2252 - DNA, 21 bp, Zea mays
ctctttgccgagtgtctactg

SEQ ID NO: 2253 - DNA, 21 bp, Zea mays
agtccctagaaaccaaacgta

SEQ ID NO: 2254 - DNA, 21 bp, Zea mays
cgaattcggaagctcgaccta

SEQ ID NO: 2255 - DNA, 21 bp, Zea mays
ccagctggatgacactcggca

SEQ ID NO: 2256 - DNA, 21 bp, Zea mays
cataaagtagcgcgtgcatct

SEQ ID NO: 2257 - DNA, 21 bp, Zea mays
ttgcacgacggagagtgtggg

SEQ ID NO: 2258 - DNA, 21 bp, Zea mays
ctggtgtcggacgaatacgga

SEQ ID NO: 2259 - DNA, 21 bp, Zea mays
cactcggcaaagaacctatat

SEQ ID NO: 2260 - DNA, 21 bp, Zea mays
ctcgtcggccgacctcgccac

SEQ ID NO: 2261 - DNA, 21 bp, Zea mays
ggaggagcgtcgacgagggca

SEQ ID NO: 2262 - DNA, 21 bp, Zea mays
cgcgtgaggggcctgttcagg

SEQ ID NO: 2263 - DNA, 21 bp, Zea mays
tgcgcggttgtggtgggaggg

SEQ ID NO: 2264 - DNA, 21 bp, Zea mays
cgctcaggcggagacccgctg

SEQ ID NO: 2265 - DNA, 21 bp, Zea mays
tgtcgtaggaagttagcgcct

SEQ ID NO: 2266 - DNA, 21 bp, Zea mays
ggcactcggcaaagaaggtcc

SEQ ID NO: 2267 - DNA, 21 bp, Zea mays
gtctccgggttaagcttccgt

SEQ ID NO: 2268 - DNA, 21 bp, Zea mays
gacaaccactacgatgagctc

SEQ ID NO: 2269 - DNA, 21 bp, Zea mays
ccgatggcatactggcgaagc

SEQ ID NO: 2270 - DNA, 21 bp, Zea mays
tgtgactgcgtcgagctccac

SEQ ID NO: 2271 - DNA, 21 bp, Zea mays
ctcgtcggcggcgaggagtcc

SEQ ID NO: 2272 - DNA, 21 bp, Zea mays
ggcccaggcacggcactagcc

SEQ ID NO: 2273 - DNA, 21 bp, Zea mays
gatggcggggattcctgagat

SEQ ID NO: 2274 - DNA, 21 bp, Zea mays
tggtgcacggttctgccgagg

SEQ ID NO: 2275 - DNA, 21 bp, Zea mays
gatggcgctgaagcgcgcgac

SEQ ID NO: 2276 - DNA, 21 bp, Zea mays
ggctgcgttggtaatcgactg

SEQ ID NO: 2277 - DNA, 21 bp, Zea mays
gaatcgtctgcttctcgcagc

SEQ ID NO: 2278 - DNA, 21 bp, Zea mays
cgtggaccgagcgattccgac

SEQ ID NO: 2279 - DNA, 21 bp, Zea mays
cgttgcaacgcatgagcactc

SEQ ID NO: 2280 - DNA, 21 bp, Zea mays
tccggtgaagtggtcgaggcg

SEQ ID NO: 2281 - DNA, 21 bp, Zea mays
gggggtgtttggtttctacgg

SEQ ID NO: 2282 - DNA, 21 bp, Zea mays
agcactcggcaaagaaagaac

SEQ ID NO: 2283 - DNA, 21 bp, Zea mays
cgggccagcccggcacgatcg

SEQ ID NO: 2284 - DNA, 21 bp, Zea mays
accgtccagaagaaacagtca

SEQ ID NO: 2285 - DNA, 21 bp, Zea mays
ccgagggaattcagcgaaggg

SEQ ID NO: 2286 - DNA, 21 bp, Zea mays
ctctttgccgagtgtctacca

SEQ ID NO: 2287 - DNA, 21 bp, Zea mays
gtcgaagtcagtgctggacct

SEQ ID NO: 2288 - DNA, 21 bp, Zea mays
gagcaggttagcgcgagcttt

SEQ ID NO: 2289 - DNA, 21 bp, Zea mays
accaacgacctccgggcagaa

SEQ ID NO: 2290 - DNA, 21 bp, Zea mays
gctcttcttcgacggatctgc

SEQ ID NO: 2291 - DNA, 21 bp, Zea mays
aaggtccaggacctccacagg

SEQ ID NO: 2292 - DNA, 21 bp, Zea mays
tgactgtggcagactggcttg

SEQ ID NO: 2293 - DNA, 21 bp, Zea mays
ccgcccctgccactgcgcata

SEQ ID NO: 2294 - DNA, 21 bp, Zea mays
gggttaggggttcgggtactg

SEQ ID NO: 2295 - DNA, 21 bp, Zea mays
gccatagactatggcgccgag

SEQ ID NO: 2296 - DNA, 21 bp, Zea mays
ccgcgatacggctgatcggcg

SEQ ID NO: 2297 - DNA, 21 bp, Zea mays
aaggcactcggcaaagatggg

SEQ ID NO: 2298 - DNA, 21 bp, Zea mays
gacactcggcaaagaaggaaa

SEQ ID NO: 2299 - DNA, 21 bp, Zea mays
aggggacgctgctggagacag

SEQ ID NO: 2300 - DNA, 21 bp, Zea mays
acccgacagcctgtttgggcg

SEQ ID NO: 2301 - DNA, 21 bp, Zea mays
tgttttatttcgggcactcgg

SEQ ID NO: 2302 - DNA, 21 bp, Zea mays
ttcgtcgtctgcggggtggag

SEQ ID NO: 2303 - DNA, 21 bp, Zea mays
caacggaggagggttgaggcc

SEQ ID NO: 2304 - DNA, 21 bp, Zea mays
ctttgccgagtgccagatcag

SEQ ID NO: 2305 - DNA, 21 bp, Zea mays
cgcctgagcggggagcaggag

SEQ ID NO: 2306 - DNA, 21 bp, Zea mays
actattggagttgctctaagg

SEQ ID NO: 2307 - DNA, 21 bp, Zea mays
gtgacactcgacaaagaggtt

SEQ ID NO: 2308 - DNA, 21 bp, Zea mays
cggaccgtccgagtatgtcac

SEQ ID NO: 2309 - DNA, 21 bp, Zea mays
agcctttgccgagtgtcatcg

SEQ ID NO: 2310 - DNA, 21 bp, Zea mays
gtgcccgtgcgttgcgacggc

SEQ ID NO: 2311 - DNA, 21 bp, Zea mays
acgacggtcagtcggcgagct

SEQ ID NO: 2312 - DNA, 21 bp, Zea mays
gtcgtctgggcagggcgtaac

SEQ ID NO: 2313 - DNA, 21 bp, Zea mays
ctctttgccgagtgccaaata

SEQ ID NO: 2314 - DNA, 21 bp, Zea mays
gctctggatggtttgattgca

SEQ ID NO: 2315 - DNA, 21 bp, Zea mays
ttagccacgaaccaaacatat

SEQ ID NO: 2316 - DNA, 21 bp, Zea mays
ctgaccacgaatcaagcaaac

SEQ ID NO: 2317 - DNA, 21 bp, Zea mays
cactcggcaaagaacctcttt

SEQ ID NO: 2318 - DNA, 21 bp, Zea mays
ccacacctgcacaccacaagc

SEQ ID NO: 2319 - DNA, 21 bp, Zea mays
ccgctaacttcctacggcaga

SEQ ID NO: 2320 - DNA, 21 bp, Zea mays
ctaccccgacgatggcgagtg

SEQ ID NO: 2321 - DNA, 21 bp, Zea mays
ggacggtcgagtgggatgttg

SEQ ID NO: 2322 - DNA, 21 bp, Zea mays
aaggcctccagagcggtggac

SEQ ID NO: 2323 - DNA, 21 bp, Zea mays
cgcgaagctaccgtgtgcccg

SEQ ID NO: 2324 - DNA, 21 bp, Zea mays
ccagcggggtgctggttggcg

SEQ ID NO: 2325 - DNA, 21 bp, Zea mays
ggacataagccttcggccgtc

SEQ ID NO: 2326 - DNA, 21 bp, Zea mays
cgtggtgcggtggatgcggag

SEQ ID NO: 2327 - DNA, 21 bp, Zea mays
tttcctgggagcctggctgct

SEQ ID NO: 2328 - DNA, 21 bp, Zea mays
gtcgcaacgcacgggcatgta

SEQ ID NO: 2329 - DNA, 21 bp, Zea mays
aggcaaaccagagacgctagc

SEQ ID NO: 2330 - DNA, 21 bp, Zea mays
caaaggctttgccgagtgtaa

SEQ ID NO: 2331 - DNA, 21 bp, Zea mays
tccggtgaagtggtcgagggc

SEQ ID NO: 2332 - DNA, 21 bp, Zea mays
tgtgacactcgacaaagaagt

SEQ ID NO: 2333 - DNA, 21 bp, Zea mays
cggaaagttgatgagcagaca

SEQ ID NO: 2334 - DNA, 21 bp, Zea mays
ttagccacgaaccaaacatag

SEQ ID NO: 2335 - DNA, 21 bp, Zea mays
gccataggctgtggcgctaaa

SEQ ID NO: 2336 - DNA, 21 bp, Zea mays
cacagcctatggcgccgagca

SEQ ID NO: 2337 - DNA, 21 bp, Zea mays
gagccacaaaaccggaggagg

SEQ ID NO: 2338 - DNA, 21 bp, Zea mays
cctccggttttgtggctccca

SEQ ID NO: 2339 - DNA, 21 bp, Zea mays
ctctttgccgagtgccatatt

SEQ ID NO: 2340 - DNA, 21 bp, Zea mays
cagagacttggtcgtccgctc

SEQ ID NO: 2341 - DNA, 21 bp, Zea mays
atcattggcgggtggctgagc

SEQ ID NO: 2342 - DNA, 21 bp, Zea mays
ggacgcaatcggacggtcgag

SEQ ID NO: 2343 - DNA, 21 bp, Zea mays
ccgtgccgtgcttgggccggg

SEQ ID NO: 2344 - DNA, 21 bp, Zea mays
ggcactaaaaagcacggccag

SEQ ID NO: 2345 - DNA, 21 bp, Zea mays
caatcccctccggttttatgg

SEQ ID NO: 2346 - DNA, 21 bp, Zea mays
cgcgtccgcggcgtgtggcgt

SEQ ID NO: 2347 - DNA, 21 bp, Zea mays
aaagtcaaacgcttgatatga

SEQ ID NO: 2348 - DNA, 21 bp, Zea mays
gagcttgactctagtccgcct

SEQ ID NO: 2349 - DNA, 21 bp, Zea mays
gtggcggacccagaaattggc

SEQ ID NO: 2350 - DNA, 21 bp, Zea mays
acccccccccccccccccaaa

SEQ ID NO: 2351 - DNA, 21 bp, Zea mays
atcattggcgggtggctgggc

SEQ ID NO: 2352 - DNA, 21 bp, Zea mays
gagtgggaagcagaccggtgc

SEQ ID NO: 2353 - DNA, 21 bp, Zea mays
atagagaatgcacccaggccg

SEQ ID NO: 2354 - DNA, 21 bp, Zea mays
actcgtgcgttgcaacgggaa

SEQ ID NO: 2355 - DNA, 21 bp, Zea mays
gagaagaaggctcaagcaaat

SEQ ID NO: 2356 - DNA, 21 bp, Zea mays
catgtgtctgggaagcggtgt

SEQ ID NO: 2357 - DNA, 21 bp, Zea mays
caatcccctccggtttttgga

SEQ ID NO: 2358 - DNA, 21 bp, Zea mays
gccatagatcttggcgcctac

SEQ ID NO: 2359 - DNA, 21 bp, Zea mays
tgtgacactcgacaaagagag

SEQ ID NO: 2360 - DNA, 21 bp, Zea mays
ttgctgggttgctcgacgggc

SEQ ID NO: 2361 - DNA, 21 bp, Zea mays
gaatgagctttgcggggagga

SEQ ID NO: 2362 - DNA, 21 bp, Zea mays
agggtctgtttggttcgctac

SEQ ID NO: 2363 - DNA, 21 bp, Zea mays
gccaagatctgtggcgccaag

SEQ ID NO: 2364 - DNA, 21 bp, Zea mays
ccacagatcttggcgccgaga

SEQ ID NO: 2365 - DNA, 21 bp, Zea mays
gcaccaagatctgtggcaccg

SEQ ID NO: 2366 - DNA, 21 bp, Zea mays
tttttgacactcggcaaagta

SEQ ID NO: 2367 - DNA, 21 bp, Zea mays
gagtgtccgtgcgttacagac

SEQ ID NO: 2368 - DNA, 21 bp, Zea mays
agggctgatttggtgactcgg

SEQ ID NO: 2369 - DNA, 21 bp, Zea mays
acgggctggcccgacacagtc

SEQ ID NO: 2370 - DNA, 21 bp, Zea mays
aaaaagcactcggcaaagagc

SEQ ID NO: 2371 - DNA, 21 bp, Zea mays
gtgcttagtccggctgcaccc

SEQ ID NO: 2372 - DNA, 21 bp, Zea mays
actgacaggcgatgtgccgcc

SEQ ID NO: 2373 - DNA, 21 bp, Zea mays
gaccgcaactgctgctatcac

SEQ ID NO: 2374 - DNA, 21 bp, Zea mays
cgtggtcgtgcgcgctttccg

SEQ ID NO: 2375 - DNA, 21 bp, Zea mays
agggcccgttcggttgacagg

SEQ ID NO: 2376 - DNA, 21 bp, Zea mays
ggcggtcacgtcgaggtacga

SEQ ID NO: 2377 - DNA, 21 bp, Zea mays
ggcagacagcaaggactgcgg

SEQ ID NO: 2378 - DNA, 21 bp, Zea mays
gaaccaaacaggcccatatac

SEQ ID NO: 2379 - DNA, 21 bp, Zea mays
cactcgatcctaggctggctg

SEQ ID NO: 2380 - DNA, 21 bp, Zea mays
cttccgcaggagaggacagga

SEQ ID NO: 2381 - DNA, 21 bp, Zea mays
gaaggttttgccgagtgtcaa

SEQ ID NO: 2382 - DNA, 21 bp, Zea mays
agggctgatttggtgacaagg

SEQ ID NO: 2383 - DNA, 21 bp, Zea mays
tatgggtccgcccctgcctgg

SEQ ID NO: 2384 - DNA, 21 bp, Zea mays
gagtgtccgtgcgttacaggc

SEQ ID NO: 2385 - DNA, 21 bp, Zea mays
ggcactcggcaaagaagcaaa

SEQ ID NO: 2386 - DNA, 21 bp, Zea mays
gtactctatgagccggcgatg

SEQ ID NO: 2387 - DNA, 21 bp, Zea mays
cccacttgttgcgggcgcagg

SEQ ID NO: 2388 - DNA, 21 bp, Zea mays
ctggtctagaactgtttccgg

SEQ ID NO: 2389 - DNA, 21 bp, Zea mays
tgtgacactcgacaaagagtc

SEQ ID NO: 2390 - DNA, 21 bp, Zea mays
gacactcggcaaagaagcaag

SEQ ID NO: 2391 - DNA, 21 bp, Zea mays
taggtggatgcccgtgcgttg

SEQ ID NO: 2392 - DNA, 21 bp, Zea mays
aaccgaacaaggccttaaaga

SEQ ID NO: 2393 - DNA, 21 bp, Zea mays
agcgtcagcatgttgcgtccg

SEQ ID NO: 2394 - DNA, 21 bp, Zea mays
tccctccctccctccctcctt

SEQ ID NO: 2395 - DNA, 21 bp, Zea mays
ttgctccggcacgaggaccta

SEQ ID NO: 2396 - DNA, 21 bp, Zea mays
agtcctctcgtgcaaatcggc

SEQ ID NO: 2397 - DNA, 21 bp, Zea mays
agcaggaggcagagcaggcag

SEQ ID NO: 2398 - DNA, 21 bp, Zea mays
cgggcactcggcaaagaagtt

SEQ ID NO: 2399 - DNA, 21 bp, Zea mays
agtcatgaaccaaacaagccc

SEQ ID NO: 2400 - DNA, 21 bp, Zea mays
cgaagcccatgtgagaacgac

SEQ ID NO: 2401 - DNA, 21 bp, Zea mays
aaacattttagtttgcagtcg

SEQ ID NO: 2402 - DNA, 21 bp, Zea mays
ttgctcggaggacctgttggt

SEQ ID NO: 2403 - DNA, 21 bp, Zea mays
acacgcagtggcggagcaccc

SEQ ID NO: 2404 - DNA, 21 bp, Zea mays
gagccacaaaaccggagggaa

SEQ ID NO: 2405 - DNA, 21 bp, Zea mays
cctccggttttgtggctcaca

SEQ ID NO: 2406 - DNA, 21 bp, Zea mays
gctcaggaggtagccccggat

SEQ ID NO: 2407 - DNA, 21 bp, Zea mays
tcggctcgactcggctcgtga

SEQ ID NO: 2408 - DNA, 21 bp, Zea mays
ggctgcgttggtaatcgaccg

SEQ ID NO: 2409 - DNA, 21 bp, Zea mays
aggatctgtccgattgcccca

SEQ ID NO: 2410 - DNA, 21 bp, Zea mays
ctggcactcggcaaagtctgt

SEQ ID NO: 2411 - DNA, 21 bp, Zea mays
gactgagtgcagggcgaccgg

SEQ ID NO: 2412 - DNA, 21 bp, Zea mays
cgagttgtgatgtggtgagcc

SEQ ID NO: 2413 - DNA, 21 bp, Zea mays
ttccaggagtgctccaggtcc

SEQ ID NO: 2414 - DNA, 21 bp, Zea mays
cgctcaggcggagacccgatg

SEQ ID NO: 2415 - DNA, 21 bp, Zea mays
gaatgaacccatgatgcacca

SEQ ID NO: 2416 - DNA, 21 bp, Zea mays
ccaattccccgtggatcagcc

SEQ ID NO: 2417 - DNA, 21 bp, Zea mays
tggtcagctcggctcggatca

SEQ ID NO: 2418 - DNA, 21 bp, Zea mays
gaggcgtcctcagcgacggac

SEQ ID NO: 2419 - DNA, 21 bp, Zea mays
ggttggactgtcgagtgggac

SEQ ID NO: 2420 - DNA, 21 bp, Zea mays
gccgagtggctgctgtactag

SEQ ID NO: 2421 - DNA, 21 bp, Zea mays
aagggctgatttggtgatcca

SEQ ID NO: 2422 - DNA, 21 bp, Zea mays
agggactgcactgcgtaaacc

SEQ ID NO: 2423 - DNA, 21 bp, Zea mays
cgtctccgcttgggtcggctc

SEQ ID NO: 2424 - DNA, 21 bp, Zea mays
gtgacgctagcgctgcaggcc

SEQ ID NO: 2425 - DNA, 21 bp, Zea mays
agggctgatttggtgaccgga

SEQ ID NO: 2426 - DNA, 21 bp, Zea mays
cctggtcctgacgtcccgact

SEQ ID NO: 2427 - DNA, 21 bp, Zea mays
agagctgccaggagtaagtgc

SEQ ID NO: 2428 - DNA, 21 bp, Zea mays
ggcgcatggctgggcgttggg

SEQ ID NO: 2429 - DNA, 21 bp, Zea mays
cgagactgcgagggctcaggt

SEQ ID NO: 2430 - DNA, 21 bp, Zea mays
cgtgccgaggacggaaggcca

SEQ ID NO: 2431 - DNA, 21 bp, Zea mays
cgccataggctatggcgtcga

SEQ ID NO: 2432 - DNA, 21 bp, Zea mays
caccggacgcaccgattttcg

SEQ ID NO: 2433 - DNA, 21 bp, Zea mays
tccgacccgttgcgatcgagg

SEQ ID NO: 2434 - DNA, 21 bp, Zea mays
cccacttgttgcgggcgtagg

SEQ ID NO: 2435 - DNA, 21 bp, Zea mays
ctggtgcgggtgcctctcgga

SEQ ID NO: 2436 - DNA, 21 bp, Zea mays
gccaaacactcgacgaacgac

SEQ ID NO: 2437 - DNA, 21 bp, Zea mays
gtcgcaacgcacgggcactca

SEQ ID NO: 2438 - DNA, 21 bp, Zea mays
ctggaccgcttgtcttcccca

SEQ ID NO: 2439 - DNA, 21 bp, Zea mays
caactcagctagaggcccttt

SEQ ID NO: 2440 - DNA, 21 bp, Zea mays
acaaaccaaacaagcccttat

SEQ ID NO: 2441 - DNA, 21 bp, Zea mays
cacagtgcggcacaaagctaa

SEQ ID NO: 2442 - DNA, 21 bp, Zea mays
tgggtcggaagcggggcaccg

SEQ ID NO: 2443 - DNA, 21 bp, Zea mays
gtgatgtcccaggcggttcgg

SEQ ID NO: 2444 - DNA, 21 bp, Zea mays
gggtgctgagccccgacatgc

SEQ ID NO: 2445 - DNA, 21 bp, Zea mays
cttttcgggcttgggccgggc

SEQ ID NO: 2446 - DNA, 21 bp, Zea mays
tcgtgatccattaccacctct

SEQ ID NO: 2447 - DNA, 21 bp, Zea mays
catgtgtctgggaagcggtgc

SEQ ID NO: 2448 - DNA, 21 bp, Zea mays
tggagtggaccgtgttgccgg

SEQ ID NO: 2449 - DNA, 21 bp, Zea mays
caggcactcggcaaagaagcc

SEQ ID NO: 2450 - DNA, 21 bp, Zea mays
agccttctttgccgagtgcct

SEQ ID NO: 2451 - DNA, 21 bp, Zea mays
ccctacagcgcctcctacgta

SEQ ID NO: 2452 - DNA, 21 bp, Zea mays
cgtggaccgagcgattctggc

SEQ ID NO: 2453 - DNA, 21 bp, Zea mays
gaaccaaacaggccctatatg

SEQ ID NO: 2454 - DNA, 21 bp, Zea mays
aggtgagtgcccgtgcgttgt

SEQ ID NO: 2455 - DNA, 21 bp, Zea mays
ggacggtcgagtgggatgctg

SEQ ID NO: 2456 - DNA, 21 bp, Zea mays
ctttgccgagtgccagatcgg

SEQ ID NO: 2457 - DNA, 21 bp, Zea mays
agccggctgcaaaccagaatg

SEQ ID NO: 2458 - DNA, 21 bp, Zea mays
gaacgacgacgagatcgagtc

SEQ ID NO: 2459 - DNA, 21 bp, Zea mays
tgatcagccgccgcccgctcc

SEQ ID NO: 2460 - DNA, 21 bp, Zea mays
cgagccctctttgccgagtgc

SEQ ID NO: 2461 - DNA, 21 bp, Zea mays
aagggctgatttggtgatcgg

SEQ ID NO: 2462 - DNA, 21 bp, Zea mays
aaaaagcactcggcaaagaaa

SEQ ID NO: 2463 - DNA, 21 bp, Zea mays
cgagttgtgatgtggtgagct

SEQ ID NO: 2464 - DNA, 21 bp, Zea mays
tggcccagagtagtcgcacga

SEQ ID NO: 2465 - DNA, 21 bp, Zea mays
gaggttgtcgatgttccagga

SEQ ID NO: 2466 - DNA, 21 bp, Zea mays
tgggcagcatccgacggacga

SEQ ID NO: 2467 - DNA, 21 bp, Zea mays
aggctggaggctagcaggacg

SEQ ID NO: 2468 - DNA, 21 bp, Zea mays
cactatttcgctctccagcag

SEQ ID NO: 2469 - DNA, 21 bp, Zea mays
gttcccgttgcaacgcacggg

SEQ ID NO: 2470 - DNA, 21 bp, Zea mays
aggccatgagggactccctgt

SEQ ID NO: 2471 - DNA, 21 bp, Zea mays
ccggcccggtggcactatggc

SEQ ID NO: 2472 - DNA, 21 bp, Zea mays
cgttaggtgcaagcgtgtaag

SEQ ID NO: 2473 - DNA, 21 bp, Zea mays
cgggcactcggcaaagagctc

SEQ ID NO: 2474 - DNA, 21 bp, Zea mays
aggcgggggcagtctacaata

SEQ ID NO: 2475 - DNA, 21 bp, Zea mays
cggtggttgcggtggcggcgg

SEQ ID NO: 2476 - DNA, 21 bp, Zea mays
gctgatcaggctgcgttggta

SEQ ID NO: 2477 - DNA, 21 bp, Zea mays
ccctaatcaccaaatcagtcc

SEQ ID NO: 2478 - DNA, 21 bp, Zea mays
gtgacacagttagccacgaat

SEQ ID NO: 2479 - DNA, 21 bp, Zea mays
cgaacgcagcggtaccctcga

SEQ ID NO: 2480 - DNA, 21 bp, Zea mays
gaagttggctcgtccacgtcg

SEQ ID NO: 2481 - DNA, 21 bp, Zea mays
taggtgtacatttgggtcggg

SEQ ID NO: 2482 - DNA, 21 bp, Zea mays
ccgcgacctggttggcgatct

SEQ ID NO: 2483 - DNA, 21 bp, Zea mays
gcgtgttgtggcccatgaccc

SEQ ID NO: 2484 - DNA, 21 bp, Zea mays
gagccacaaaaccggaggaaa

SEQ ID NO: 2485 - DNA, 21 bp, Zea mays
cctccggttttgtggctctaa

SEQ ID NO: 2486 - DNA, 21 bp, Zea mays
caatcccctccggtttttggc

SEQ ID NO: 2487 - DNA, 21 bp, Zea mays
ccgtgccgtgcttgggccgat

SEQ ID NO: 2488 - DNA, 21 bp, Zea mays
ttggtgtaaccgaacaagccc

SEQ ID NO: 2489 - DNA, 21 bp, Zea mays
gaaccaaacaggccctaggta

SEQ ID NO: 2490 - DNA, 21 bp, Zea mays
aaccttgtccgcgtgagcgac

SEQ ID NO: 2491 - DNA, 21 bp, Zea mays
caagatgcagttggtggacaa

SEQ ID NO: 2492 - DNA, 21 bp, Zea mays
cactcggcaaagaacctatac

SEQ ID NO: 2493 - DNA, 21 bp, Zea mays
tggcccaggcacggcacgcaa

SEQ ID NO: 2494 - DNA, 21 bp, Zea mays
gtgccgtgcctgggccagcaa

SEQ ID NO: 2495 - DNA, 21 bp, Zea mays
agcactcggcaaagaaagtac

SEQ ID NO: 2496 - DNA, 21 bp, Zea mays
ggcgtcgtcgtcggatgctgg

SEQ ID NO: 2497 - DNA, 21 bp, Zea mays
agagtgactccacaaaccaaa

SEQ ID NO: 2498 - DNA, 21 bp, Zea mays
cgggccagcccggcacggatg

SEQ ID NO: 2499 - DNA, 21 bp, Zea mays
actcggcaaagcctcggattt

SEQ ID NO: 2500 - DNA, 21 bp, Zea mays
cgttggctctcggcaaagagg

SEQ ID NO: 2501 - DNA, 21 bp, Zea mays
gccatagactatggcgctgag

SEQ ID NO: 2502 - DNA, 21 bp, Zea mays
cagtttcaacggtcgtctcgc

SEQ ID NO: 2503 - DNA, 21 bp, Zea mays
gggggagcgacaactgccgtc

SEQ ID NO: 2504 - DNA, 21 bp, Zea mays
gagcggggagcgtagggcaaa

SEQ ID NO: 2505 - DNA, 21 bp, Zea mays
tgcccgtgcgttgcaacaaca

SEQ ID NO: 2506 - DNA, 21 bp, Zea mays
acggctgtctgcgctatgcgg

SEQ ID NO: 2507 - DNA, 21 bp, Zea mays
gagccacaaaaccggagcaga

SEQ ID NO: 2508 - DNA, 21 bp, Zea mays
gtaggtgcccgtgcgttgcca

SEQ ID NO: 2509 - DNA, 21 bp, Zea mays
agtgtgacactcggcaaagaa

SEQ ID NO: 2510 - DNA, 21 bp, Zea mays
gtagcaacgcacgggcattca

SEQ ID NO: 2511 - DNA, 21 bp, Zea mays
gtgctttgccgagtgtcaggg

SEQ ID NO: 2512 - DNA, 21 bp, Zea mays
gttttcttagtgggctgggcc

SEQ ID NO: 2513 - DNA, 21 bp, Zea mays
gtcgcaacgcacgggcaccta

SEQ ID NO: 2514 - DNA, 21 bp, Zea mays
ccgtgccacggacggtccaga

SEQ ID NO: 2515 - DNA, 21 bp, Zea mays
gactgagtgcagggcgacctt

SEQ ID NO: 2516 - DNA, 21 bp, Zea mays
gggcggagtctgacgtaaggc

SEQ ID NO: 2517 - DNA, 21 bp, Zea mays
cgtggcgtcgacgtggcctcg

SEQ ID NO: 2518 - DNA, 21 bp, Zea mays
ggttgctgggataacttggtc

SEQ ID NO: 2519 - DNA, 21 bp, Zea mays
gggggtgtttggtttctaaac

SEQ ID NO: 2520 - DNA, 21 bp, Zea mays
tgcgtgaccggccgagcgcgg

SEQ ID NO: 2521 - DNA, 21 bp, Zea mays
taggcgaagtcgtgcgtgcat

SEQ ID NO: 2522 - DNA, 21 bp, Zea mays
gtagcggttgcgtgcgcaggc

SEQ ID NO: 2523 - DNA, 21 bp, Zea mays
catgggtaagccgatcctagg

SEQ ID NO: 2524 - DNA, 21 bp, Zea mays
cggcgaagggtggggttagct

SEQ ID NO: 2525 - DNA, 21 bp, Zea mays
gcacccaacaacctgcttcag

SEQ ID NO: 2526 - DNA, 21 bp, Zea mays
ctggttgtgggttgggccagg

SEQ ID NO: 2527 - DNA, 21 bp, Zea mays
cgagtgtcggttgatctgagc

SEQ ID NO: 2528 - DNA, 21 bp, Zea mays
tggcccagagtagtcgcccga

SEQ ID NO: 2529 - DNA, 21 bp, Zea mays
tcgtgtcggaccgtgctttga

SEQ ID NO: 2530 - DNA, 21 bp, Zea mays
cagagcgaagctgaggcgagc

SEQ ID NO: 2531 - DNA, 21 bp, Zea mays
tcgtatctggtgagcctggct

SEQ ID NO: 2532 - DNA, 21 bp, Zea mays
gacgacttcgtacggcgggca

SEQ ID NO: 2533 - DNA, 21 bp, Zea mays
ggtgacgctcccgaagcggac

SEQ ID NO: 2534 - DNA, 21 bp, Zea mays
aagggctgatttggtgactgg

SEQ ID NO: 2535 - DNA, 21 bp, Zea mays
cttcggctctgcgccatcctt

SEQ ID NO: 2536 - DNA, 21 bp, Zea mays
gctggccgtgggcttgacttg

SEQ ID NO: 2537 - DNA, 21 bp, Zea mays
ttctttgccgagtgccagctt

SEQ ID NO: 2538 - DNA, 21 bp, Zea mays
gaggacaaagtgcgcactaaa

SEQ ID NO: 2539 - DNA, 21 bp, Zea mays
tggtacggcgtggcacaacga

SEQ ID NO: 2540 - DNA, 21 bp, Zea mays
accacgtaccgaccaggtgcg

SEQ ID NO: 2541 - DNA, 21 bp, Zea mays
ttctttgccgagtgccatggt

SEQ ID NO: 2542 - DNA, 21 bp, Zea mays
taggctctagggttcttgaga

SEQ ID NO: 2543 - DNA, 21 bp, Zea mays
gcctcgctgggttgctcggtg

SEQ ID NO: 2544 - DNA, 21 bp, Zea mays
caagatgcagttggtggatga

SEQ ID NO: 2545 - DNA, 21 bp, Zea mays
ccaacggtgctgcgtcagggg

SEQ ID NO: 2546 - DNA, 21 bp, Zea mays
gactctcaacgaaagcagttt

SEQ ID NO: 2547 - DNA, 21 bp, Zea mays
gacactcggcaaagaagcacg

SEQ ID NO: 2548 - DNA, 21 bp, Zea mays
ggtgacactcggcaaaggcgc

SEQ ID NO: 2549 - DNA, 21 bp, Zea mays
gcttgcagcgattgagcctag

SEQ ID NO: 2550 - DNA, 21 bp, Zea mays
gaaccaggttgcagggatggt

SEQ ID NO: 2551 - DNA, 21 bp, Zea mays
cgagacttcggatggccgcga

SEQ ID NO: 2552 - DNA, 21 bp, Zea mays
cggcggctttgccgagtgctt

SEQ ID NO: 2553 - DNA, 21 bp, Zea mays
ggcactcggcaaagaagctct

SEQ ID NO: 2554 - DNA, 21 bp, Zea mays
gcctcgctgggttgctcaacg

SEQ ID NO: 2555 - DNA, 21 bp, Zea mays
cgtaccgaccaggtgcgcaga

SEQ ID NO: 2556 - DNA, 21 bp, Zea mays
aagctgaggcgtgctgcgtat

SEQ ID NO: 2557 - DNA, 21 bp, Zea mays
gagcggggagcgtagggcaag

SEQ ID NO: 2558 - DNA, 21 bp, Zea mays
cacccgttttgctgcgctctc

SEQ ID NO: 2559 - DNA, 21 bp, Zea mays
cggcggctttgccgagtgtcc

SEQ ID NO: 2560 - DNA, 21 bp, Zea mays
gacactcggcaaagaagtctc

SEQ ID NO: 2561 - DNA, 21 bp, Zea mays
ctcggcaaaggctcggattcc

SEQ ID NO: 2562 - DNA, 21 bp, Zea mays
gagccgagccgagctgacctc

SEQ ID NO: 2563 - DNA, 21 bp, Zea mays
ggaccaaggtccgatctacca

SEQ ID NO: 2564 - DNA, 21 bp, Zea mays
tccggtgaagtggtcgacgac

SEQ ID NO: 2565 - DNA, 21 bp, Zea mays
ggggacgggtttggggagcta

SEQ ID NO: 2566 - DNA, 21 bp, Zea mays
gtcaaaacaggtggtggactt

SEQ ID NO: 2567 - DNA, 21 bp, Zea mays
caggagtaagtaccgcctgtc

SEQ ID NO: 2568 - DNA, 21 bp, Zea mays
caacggtggcttccctaggaa

SEQ ID NO: 2569 - DNA, 21 bp, Zea mays
gggttgaccgacgaggacgtc

SEQ ID NO: 2570 - DNA, 21 bp, Zea mays
gacgacgacgacgacgcgtcg

SEQ ID NO: 2571 - DNA, 21 bp, Zea mays
ccgctaacttcctacggccgc

SEQ ID NO: 2572 - DNA, 21 bp, Zea mays
gactctcgggttgttctgggc

SEQ ID NO: 2573 - DNA, 21 bp, Zea mays
caaccaaacgcaccctaagag

SEQ ID NO: 2574 - DNA, 21 bp, Zea mays
aggcaggcaggcaggcatgtc

SEQ ID NO: 2575 - DNA, 21 bp, Zea mays
ccaagaggaggaccaggatca

SEQ ID NO: 2576 - DNA, 21 bp, Zea mays
tggactttgtgtgcggtgtgg

SEQ ID NO: 2577 - DNA, 21 bp, Zea mays
ggcctgtttggtttgtggcta

SEQ ID NO: 2578 - DNA, 21 bp, Zea mays
ttgcaacgcacgggcactcat

SEQ ID NO: 2579 - DNA, 21 bp, Zea mays
aggcccattacagaggggtga

SEQ ID NO: 2580 - DNA, 21 bp, Zea mays
gtggggccaacagggcgaatc

SEQ ID NO: 2581 - DNA, 21 bp, Zea mays
ggcactcggcaaagaaggctc

SEQ ID NO: 2582 - DNA, 21 bp, Zea mays
ctctttgccgagtgtctgctg

SEQ ID NO: 2583 - DNA, 21 bp, Zea mays
tcttgcgcagccggagctccg

SEQ ID NO: 2584 - DNA, 21 bp, Zea mays
gcttgcagcgattgagcctgg

SEQ ID NO: 2585 - DNA, 21 bp, Zea mays
gggggtgtttggtttctagga

SEQ ID NO: 2586 - DNA, 21 bp, Zea mays
ggcactcggcaaagaagtttt

SEQ ID NO: 2587 - DNA, 21 bp, Zea mays
gaggcctggacgcgaacgggg

SEQ ID NO: 2588 - DNA, 21 bp, Zea mays
aggcggttttgtcttagggtt

SEQ ID NO: 2589 - DNA, 21 bp, Zea mays
ttctttgccgagtgccagatc

SEQ ID NO: 2590 - DNA, 21 bp, Zea mays
ctggtgcgggtgcctctcagt

SEQ ID NO: 2591 - DNA, 21 bp, Zea mays
atcattggcgggtggctgagt

SEQ ID NO: 2592 - DNA, 21 bp, Zea mays
tgcctgggccggcccatcgtg

SEQ ID NO: 2593 - DNA, 21 bp, Zea mays
cactcggcaaagaacctgaca

SEQ ID NO: 2594 - DNA, 21 bp, Zea mays
agcagctgtcccaaacagggc

SEQ ID NO: 2595 - DNA, 21 bp, Zea mays
cgggcactcggcaaagatttt

SEQ ID NO: 2596 - DNA, 21 bp, Zea mays
cgagcactcggcaaagatcgt

SEQ ID NO: 2597 - DNA, 21 bp, Zea mays
gtgtccgtgcgttgcgacgga

SEQ ID NO: 2598 - DNA, 21 bp, Zea mays
cgggcactcggcaaagagctt

SEQ ID NO: 2599 - DNA, 21 bp, Zea mays
ttagccacgaaccaaacaact

SEQ ID NO: 2600 - DNA, 21 bp, Zea mays
cttcagacactcggtaaagaa

SEQ ID NO: 2601 - DNA, 21 bp, Zea mays
catagacacagacggtcccac

SEQ ID NO: 2602 - DNA, 21 bp, Zea mays
actgaccgaccatgaattctt

SEQ ID NO: 2603 - DNA, 21 bp, Zea mays
ctggctgtgactgcgcgctcc

SEQ ID NO: 2604 - DNA, 21 bp, Zea mays
ttctttgccgagtgccaaaac

SEQ ID NO: 2605 - DNA, 21 bp, Zea mays
ccctaacaggggttgggtggt

SEQ ID NO: 2606 - DNA, 21 bp, Zea mays
gaaggggagacttcgctcggc

SEQ ID NO: 2607 - DNA, 21 bp, Zea mays
tgtctttgccgagtgccgttc

SEQ ID NO: 2608 - DNA, 21 bp, Zea mays
catcgggtagcgggtatgggg

SEQ ID NO: 2609 - DNA, 21 bp, Zea mays
gcagaggagcagcggagaagc

SEQ ID NO: 2610 - DNA, 21 bp, Zea mays
acaacccctggaccgggacca

SEQ ID NO: 2611 - DNA, 21 bp, Zea mays
cgagcactcggcaaagacccg

SEQ ID NO: 2612 - DNA, 21 bp, Zea mays
gccgaaccaaacaggccctag

SEQ ID NO: 2613 - DNA, 21 bp, Zea mays
caggcggaggccaagctggcg

SEQ ID NO: 2614 - DNA, 21 bp, Zea mays
tggattgagtgagattgggtg

SEQ ID NO: 2615 - DNA, 21 bp, Zea mays
gagcaggctcgcgtgaggccg

SEQ ID NO: 2616 - DNA, 21 bp, Zea mays
aggtctttgccgagtgccaga

SEQ ID NO: 2617 - DNA, 21 bp, Zea mays
ggagatggcgctaatgacgat

SEQ ID NO: 2618 - DNA, 21 bp, Zea mays
ccagaccgggctgatccacgg

SEQ ID NO: 2619 - DNA, 21 bp, Zea mays
agagtctccccgagccacccc

SEQ ID NO: 2620 - DNA, 21 bp, Zea mays
atgaaccgagcgagccacgag

SEQ ID NO: 2621 - DNA, 21 bp, Zea mays
cttcgcgggtatgggtttggg

SEQ ID NO: 2622 - DNA, 21 bp, Zea mays
gctgtcaggagtaagtaccac

SEQ ID NO: 2623 - DNA, 21 bp, Zea mays
gccttgcctcgggcagagcca

SEQ ID NO: 2624 - DNA, 21 bp, Zea mays
gtcagcagggtggacaggcgg

SEQ ID NO: 2625 - DNA, 21 bp, Zea mays
gacgacgacgacgacgcgcgc

SEQ ID NO: 2626 - DNA, 21 bp, Zea mays
aagatctatggcgccgaggta

SEQ ID NO: 2627 - DNA, 21 bp, Zea mays
gacagcggcagcacgggggag

SEQ ID NO: 2628 - DNA, 21 bp, Zea mays
ggttctgtagcgctggactga

SEQ ID NO: 2629 - DNA, 21 bp, Zea mays
caagatctgtggcgccgagct

SEQ ID NO: 2630 - DNA, 21 bp, Zea mays
ctagctcggcgccacagatct

SEQ ID NO: 2631 - DNA, 21 bp, Zea mays
cggtgggctcggccttcttat

SEQ ID NO: 2632 - DNA, 21 bp, Zea mays
tgcccgtgcgttgcaacagaa

SEQ ID NO: 2633 - DNA, 21 bp, Zea mays
gagggatgcggagtctgggag

SEQ ID NO: 2634 - DNA, 21 bp, Zea mays
gacactcggcaaagaagtctt

SEQ ID NO: 2635 - DNA, 21 bp, Zea mays
ctggcactcggcaaagtcttt

SEQ ID NO: 2636 - DNA, 21 bp, Zea mays
ctgcgcaccttccttcgtcgg

SEQ ID NO: 2637 - DNA, 21 bp, Zea mays
aggtctttgccgagtgctgaa

SEQ ID NO: 2638 - DNA, 21 bp, Zea mays
gtgacactcgacaaagagaat

SEQ ID NO: 2639 - DNA, 21 bp, Zea mays
caaccaaacgcaccctaaaga

SEQ ID NO: 2640 - DNA, 21 bp, Zea mays
atggaccagcacgaggcacgg

SEQ ID NO: 2641 - DNA, 21 bp, Zea mays
gagcggggagcgtagggcatg

SEQ ID NO: 2642 - DNA, 21 bp, Zea mays
gtatctggctggccaggatga

SEQ ID NO: 2643 - DNA, 21 bp, Zea mays
cgtctcgaccggagtctgctg

SEQ ID NO: 2644 - DNA, 21 bp, Zea mays
ctggtctagaactgtttccga

SEQ ID NO: 2645 - DNA, 21 bp, Zea mays
ctaataggccggcccaaatca

SEQ ID NO: 2646 - DNA, 21 bp, Zea mays
tgggccgtgccagaaattgtg

SEQ ID NO: 2647 - DNA, 21 bp, Zea mays
ggcgtcgtcgtcggatgcttt

SEQ ID NO: 2648 - DNA, 21 bp, Zea mays
gaacaagctggccatcgtgaa

SEQ ID NO: 2649 - DNA, 21 bp, Zea mays
ctctttgccgagtgccacaca

SEQ ID NO: 2650 - DNA, 21 bp, Zea mays
gcgtacaggagggtcgatggc

SEQ ID NO: 2651 - DNA, 21 bp, Zea mays
aggcccattacagagggtgag

SEQ ID NO: 2652 - DNA, 21 bp, Zea mays
ggcgaagtcgtgcgtccagca

SEQ ID NO: 2653 - DNA, 21 bp, Zea mays
tggactcccaaactagcccta

SEQ ID NO: 2654 - DNA, 21 bp, Zea mays
attgcagccgcagcaagccgc

SEQ ID NO: 2655 - DNA, 21 bp, Zea mays
aatacaaacgaacaaggcctt

SEQ ID NO: 2656 - DNA, 21 bp, Zea mays
catgcttggctccttgcacgc

SEQ ID NO: 2657 - DNA, 21 bp, Zea mays
tccaccacctgtttttgacac

SEQ ID NO: 2658 - DNA, 21 bp, Zea mays
tgggtcatcgtcgtcgtcgtc

SEQ ID NO: 2659 - DNA, 21 bp, Zea mays
tatataagaaggccgagccca

SEQ ID NO: 2660 - DNA, 21 bp, Zea mays
tgacggccggccggccggccg

SEQ ID NO: 2661 - DNA, 21 bp, Zea mays
cctctggtctctttctgatct

SEQ ID NO: 2662 - DNA, 21 bp, Zea mays
gggctagccaaggagactgcc

SEQ ID NO: 2663 - DNA, 21 bp, Zea mays
ggaacggagccgctctgttct

SEQ ID NO: 2664 - DNA, 21 bp, Zea mays
aagcgatctggtgcatccgat

SEQ ID NO: 2665 - DNA, 21 bp, Zea mays
cccatcgccgcttctggcaca

SEQ ID NO: 2666 - DNA, 21 bp, Zea mays
tgggattggatgggtttgaat

SEQ ID NO: 2667 - DNA, 21 bp, Zea mays
ttcgagctaacgagctggctc

SEQ ID NO: 2668 - DNA, 21 bp, Zea mays
ctgtcagtggccgtgtcggac

SEQ ID NO: 2669 - DNA, 21 bp, Zea mays
attttgcctaaggttagtcgt

SEQ ID NO: 2670 - DNA, 21 bp, Zea mays
cctggccaatctcgtcaacct

SEQ ID NO: 2671 - DNA, 21 bp, Zea mays
gggcttgttcggttagctctc

SEQ ID NO: 2672 - DNA, 21 bp, Zea mays
gttaacttgccacactttgcc

SEQ ID NO: 2673 - DNA, 21 bp, Zea mays
cctaatcaccaaattagccct

SEQ ID NO: 2674 - DNA, 21 bp, Zea mays
agactttgttcgtttgtgccg

SEQ ID NO: 2675 - DNA, 21 bp, Zea mays
agagctgggttgcagtcggtg

SEQ ID NO: 2676 - DNA, 21 bp, Zea mays
ggccgagcccaccggcactta

SEQ ID NO: 2677 - DNA, 21 bp, Zea mays
ctgaggtcttgttcgtttgtg

SEQ ID NO: 2678 - DNA, 21 bp, Zea mays
tggcggcggcccggcgcggcg

SEQ ID NO: 2679 - DNA, 21 bp, Zea mays
agccacaaaccaaacaggccc

SEQ ID NO: 2680 - DNA, 21 bp, Zea mays
cctaagttgccacactttgcc

SEQ ID NO: 2681 - DNA, 21 bp, Zea mays
ctctcgtccgcgccgacgacg

SEQ ID NO: 2682 - DNA, 21 bp, Zea mays
gttgcttccaaacagggccta

SEQ ID NO: 2683 - DNA, 21 bp, Zea mays
gttttggctctttgccgagtg

SEQ ID NO: 2684 - DNA, 21 bp, Zea mays
tgtcgctggcactcggcaaag

SEQ ID NO: 2685 - DNA, 21 bp, Zea mays
tttggattgaagggagctctg

SEQ ID NO: 2686 - DNA, 21 bp, Zea mays
tatgttgacgtcacaagtgta

SEQ ID NO: 2687 - DNA, 21 bp, Zea mays
tggagaagcagggcacgtgca

SEQ ID NO: 2688 - DNA, 21 bp, Zea mays
attgaactacatcatgttgtt

SEQ ID NO: 2689 - DNA, 21 bp, Zea mays
tactcaatgacagggaatagg

SEQ ID NO: 2690 - DNA, 21 bp, Zea mays
gatccctggtcaccaaatcag

SEQ ID NO: 2691 - DNA, 21 bp, Zea mays
agtcccgagcatagggtccag

SEQ ID NO: 2692 - DNA, 21 bp, Zea mays
atttgattgcatgcttgcacc

SEQ ID NO: 2693 - DNA, 21 bp, Zea mays
agatgcagacgtcgggctcct

SEQ ID NO: 2694 - DNA, 21 bp, Zea mays
ggcggcggcggttgacgacga

SEQ ID NO: 2695 - DNA, 21 bp, Zea mays
ttgttcggttagctctcaatc

SEQ ID NO: 2696 - DNA, 21 bp, Zea mays
accatcaaaccaaacaggccc

SEQ ID NO: 2697 - DNA, 21 bp, Zea mays
ggcctgcgcaagaagaagccc

SEQ ID NO: 2698 - DNA, 21 bp, Zea mays
ttcgtcctgcgtccgccactg

SEQ ID NO: 2699 - DNA, 21 bp, Zea mays
ccgtcgctgagagcccgagcc

SEQ ID NO: 2700 - DNA, 21 bp, Zea mays
ccgtgccggaggaggcggtcg

SEQ ID NO: 2701 - DNA, 21 bp, Zea mays
acagcgccaacgacctcaccg

SEQ ID NO: 2702 - DNA, 21 bp, Zea mays
cttcctcccctggttctgcct

SEQ ID NO: 2703 - DNA, 21 bp, Zea mays
gggggtgggcactgccgcgtg

SEQ ID NO: 2704 - DNA, 21 bp, Zea mays
tcgctggcactcggcaaagag

SEQ ID NO: 2705 - DNA, 21 bp, Zea mays
ttaggccttgttcgtttgtgt

SEQ ID NO: 2706 - DNA, 21 bp, Zea mays
cattatgtgcaagcgtgcaag

SEQ ID NO: 2707 - DNA, 21 bp, Zea mays
attcagccacaagccatgaca

SEQ ID NO: 2708 - DNA, 21 bp, Zea mays
tatatgtccgtgcgttgcaac

SEQ ID NO: 2709 - DNA, 21 bp, Zea mays
tgtaatccgacggaaacgaac

SEQ ID NO: 2710 - DNA, 21 bp, Zea mays
tccaatccgacggaaacgaac

SEQ ID NO: 2711 - DNA, 21 bp, Zea mays
cactagaaaccaaacaccccc

SEQ ID NO: 2712 - DNA, 21 bp, Zea mays
tttttgggagcctggctgctc

SEQ ID NO: 2713 - DNA, 21 bp, Zea mays
gtctccgcttcgctcgccaac

SEQ ID NO: 2714 - DNA, 21 bp, Zea mays
ccctcgtctgcatctgctcct

SEQ ID NO: 2715 - DNA, 21 bp, Zea mays
aagggcctgtttggtttgtgg

SEQ ID NO: 2716 - DNA, 21 bp, Zea mays
gcgctacgccgccgccgagca

SEQ ID NO: 2717 - DNA, 21 bp, Zea mays
atttgatgcctaacttgccac

SEQ ID NO: 2718 - DNA, 21 bp, Zea mays
catcgccgccaaccgactgga

SEQ ID NO: 2719 - DNA, 21 bp, Zea mays
gcttgattgcatgcttgcacc

SEQ ID NO: 2720 - DNA, 21 bp, Zea mays
gcgctctccacggcagtcggc

SEQ ID NO: 2721 - DNA, 21 bp, Zea mays
catgtgcccgtgcgttgctac

SEQ ID NO: 2722 - DNA, 21 bp, Zea mays
aggttcccgtcgccgctggtg

SEQ ID NO: 2723 - DNA, 21 bp, Zea mays
tgaagctgccagcatgatctg

SEQ ID NO: 2724 - DNA, 21 bp, Zea mays
gtgtttggtttctagggacta

SEQ ID NO: 2725 - DNA, 21 bp, Zea mays
aactcacgcaactatcagcta

SEQ ID NO: 2726 - DNA, 21 bp, Zea mays
acacatcacaggcggtccagt

SEQ ID NO: 2727 - DNA, 21 bp, Zea mays
gtttctttgccgagtgtcttt

SEQ ID NO: 2728 - DNA, 21 bp, Zea mays
gagctctttgccgagtgtttt

SEQ ID NO: 2729 - DNA, 21 bp, Zea mays
gagaaaaaacactcggcaaag

SEQ ID NO: 2730 - DNA, 21 bp, Zea mays
tcgcaacgcacgggtaaccga

SEQ ID NO: 2731 - DNA, 21 bp, Zea mays
tcttagccaaaaggccgagaa

SEQ ID NO: 2732 - DNA, 21 bp, Zea mays
attcccgtcggttgtcagccg

SEQ ID NO: 2733 - DNA, 21 bp, Zea mays
acaagcaaaccatctgatcca

SEQ ID NO: 2734 - DNA, 21 bp, Zea mays
aggatggcttctacctgcaag

SEQ ID NO: 2735 - DNA, 21 bp, Zea mays
gacagcaatacagcagtcact

SEQ ID NO: 2736 - DNA, 21 bp, Zea mays
accgggttggactgtcgagtg

SEQ ID NO: 2737 - DNA, 21 bp, Zea mays
ccctagaaaccaaacaccccc

SEQ ID NO: 2738 - DNA, 21 bp, Zea mays
ggtgtttggtttctagggact

SEQ ID NO: 2739 - DNA, 21 bp, Zea mays
acagtcattttcggcggccag

SEQ ID NO: 2740 - DNA, 21 bp, Zea mays
tggaagccacaaaaccggagg

SEQ ID NO: 2741 - DNA, 21 bp, Zea mays
aaaccgctcgctgctcgtctg

SEQ ID NO: 2742 - DNA, 21 bp, Zea mays
gtcggattgcacctggaatcg

SEQ ID NO: 2743 - DNA, 21 bp, Zea mays
ggctgtttggttcgtggctaa

SEQ ID NO: 2744 - DNA, 21 bp, Zea mays
tgtggggctgcaaacagcctg

SEQ ID NO: 2745 - DNA, 21 bp, Zea mays
acgatcctccaggctccagcg

SEQ ID NO: 2746 - DNA, 21 bp, Zea mays
aggtaatggaagccctgggtt

SEQ ID NO: 2747 - DNA, 21 bp, Zea mays
gttaaacgcttgatgtgaccc

SEQ ID NO: 2748 - DNA, 21 bp, Zea mays
tcggttgtaccggaatgagcc

SEQ ID NO: 2749 - DNA, 21 bp, Zea mays
tttaggtttgtacacatagtg

SEQ ID NO: 2750 - DNA, 21 bp, Zea mays
tgattgagccgtgccaatatc

SEQ ID NO: 2751 - DNA, 21 bp, Zea mays
ggatgtgtttggttataataa

SEQ ID NO: 2752 - DNA, 21 bp, Zea mays
acttgccacactttgcctaac

SEQ ID NO: 2753 - DNA, 21 bp, Zea mays
gggtcacatcaagcgtttgac

SEQ ID NO: 2754 - DNA, 21 bp, Zea mays
tggtgcatccgatctagatct

SEQ ID NO: 2755 - DNA, 21 bp, Zea mays
cgcttggtgcagatcgggacc

SEQ ID NO: 2756 - DNA, 21 bp, Zea mays
cttaggtttgtacacatagtg

SEQ ID NO: 2757 - DNA, 21 bp, Zea mays
ggcataccttagagagaaact

SEQ ID NO: 2758 - DNA, 21 bp, Zea mays
atctcatcccgttctgtcatt

SEQ ID NO: 2759 - DNA, 21 bp, Zea mays
agacaaaatactgtagaaaaa

SEQ ID NO: 2760 - DNA, 21 bp, Zea mays
ctcaatacatcttaatccact

SEQ ID NO: 2761 - DNA, 21 bp, Zea mays
agatccgacgatatagagata

SEQ ID NO: 2762 - DNA, 21 bp, Zea mays
atgagtgaagctgccagcatg

SEQ ID NO: 2763 - DNA, 21 bp, Zea mays
tgaagctgccagcatgatcta

SEQ ID NO: 2764 - DNA, 21 bp, Zea mays
gtatgcgctgcctctaatatt

SEQ ID NO: 2765 - DNA, 21 bp, Zea mays
cgacagaagcagagctgccag

SEQ ID NO: 2766 - DNA, 21 bp, Zea mays
ctaatctaacagactcggtaa

SEQ ID NO: 2767 - DNA, 21 bp, Zea mays
tccacaggctttcttgaactg

SEQ ID NO: 2768 - DNA, 21 bp, Zea mays
tgtttgctgatggtcatctaa

SEQ ID NO: 2769 - DNA, 21 bp, Zea mays
ccgcgccacacttttaagcca

SEQ ID NO: 2770 - DNA, 21 bp, Zea mays
gaagcttaacaataacattct

SEQ ID NO: 2771 - DNA, 21 bp, Zea mays
gagctcccttcgatccaatcc

SEQ ID NO: 2772 - DNA, 21 bp, Zea mays
gttggtgaagctgccagcatg

SEQ ID NO: 2773 - DNA, 21 bp, Zea mays
ttacgttacattttgtgaacc

SEQ ID NO: 2774 - DNA, 21 bp, Zea mays
atgacggccacacaaatccac

SEQ ID NO: 2775 - DNA, 21 bp, Zea mays
atttatcacacggcttaacta

SEQ ID NO: 2776 - DNA, 21 bp, Zea mays
tccaaagggatcgcattgatc

SEQ ID NO: 2777 - DNA, 21 bp, Zea mays
cagccaaggatgacttgccgg

SEQ ID NO: 2778 - DNA, 21 bp, Zea mays
gatcagatctgcatcaactct

SEQ ID NO: 2779 - DNA, 21 bp, Zea mays
tacggttggatcatgatctaa

SEQ ID NO: 2780 - DNA, 21 bp, Zea mays
tagcctggttccatatgagag

SEQ ID NO: 2781 - DNA, 21 bp, Zea mays
agccgttgccagtcataagat

SEQ ID NO: 2782 - DNA, 21 bp, Zea mays
agaatcttgatgatgctgcat

SEQ ID NO: 2783 - DNA, 21 bp, Zea mays
ctaatccataggtcaaaaaac

SEQ ID NO: 2784 - DNA, 21 bp, Zea mays
aggttgttaaggcgttttagc

SEQ ID NO: 2785 - DNA, 21 bp, Zea mays
ttccacagctttcttgaactg

SEQ ID NO: 2786 - DNA, 21 bp, Zea mays
atactcattccttgtatgcca

SEQ ID NO: 2787 - DNA, 21 bp, Zea mays
atcacaccctccacatccaac

SEQ ID NO: 2788 - DNA, 21 bp, Zea mays
catctaaatttagaggaccgt

SEQ ID NO: 2789 - DNA, 21 bp, Zea mays
tctctaaatttagaggaccgt

SEQ ID NO: 2790 - DNA, 21 bp, Zea mays
ggtaggcgtggttttatccga

SEQ ID NO: 2791 - DNA, 21 bp, Zea mays
attttggtgcaaacgtgcaat

SEQ ID NO: 2792 - DNA, 21 bp, Zea mays
agtggccatccaagcagccct

SEQ ID NO: 2793 - DNA, 21 bp, Zea mays
aacaccctgaatttggggtat

SEQ ID NO: 2794 - DNA, 21 bp, Zea mays
cgccagcttaacgaagctacc

SEQ ID NO: 2795 - DNA, 21 bp, Zea mays
gggctgcgacctaaccatcac

SEQ ID NO: 2796 - DNA, 21 bp, Zea mays
tgtcacttggttcctgaactc

SEQ ID NO: 2797 - DNA, 21 bp, Zea mays
cgagccgggacgtggcggcag

SEQ ID NO: 2798 - DNA, 21 bp, Zea mays
ttcgtacacaacgaagcataa

SEQ ID NO: 2799 - DNA, 21 bp, Zea mays
aatgcttatgatgccatgctc

SEQ ID NO: 2800 - DNA, 21 bp, Zea mays
gaataaagacaacgaagcctg

SEQ ID NO: 2801 - DNA, 21 bp, Zea mays
tagctcggcgccataggctgt

SEQ ID NO: 2802 - DNA, 21 bp, Zea mays
atgtttggtttctagggacta

SEQ ID NO: 2803 - DNA, 21 bp, Zea mays
cccgggtcacatcaagcgttt

SEQ ID NO: 2804 - DNA, 21 bp, Zea mays
ctaaagtttagcccgggtcac

SEQ ID NO: 2805 - DNA, 21 bp, Zea mays
ccgggctaaactttagtccac

SEQ ID NO: 2806 - DNA, 21 bp, Zea mays
cgtgagctcgctcgactcgtg

SEQ ID NO: 2807 - DNA, 21 bp, Zea mays
tctgttggtccgctatctagc

SEQ ID NO: 2808 - DNA, 21 bp, Zea mays
ctgtttggttcgtggctaact

SEQ ID NO: 2809 - DNA, 21 bp, Zea mays
agtctatcctcatttttgtga

SEQ ID NO: 2810 - DNA, 21 bp, Zea mays
tgacggatatggatagccgat

SEQ ID NO: 2811 - DNA, 21 bp, Zea mays
gatctatggcgccgagctcgg

SEQ ID NO: 2812 - DNA, 21 bp, Zea mays
gctcggcgccaagatctatgg

SEQ ID NO: 2813 - DNA, 21 bp, Zea mays
ggataagcagctcgtcctcga

SEQ ID NO: 2814 - DNA, 21 bp, Zea mays
tgagctcccaaactagcccta

SEQ ID NO: 2815 - DNA, 21 bp, Zea mays
tctagctttgccgagtgcttc

SEQ ID NO: 2816 - DNA, 21 bp, Zea mays
attgcaaccaaacgcaccctt

SEQ ID NO: 2817 - DNA, 21 bp, Zea mays
cctggcgcaccgcagcagtcg

SEQ ID NO: 2818 - DNA, 21 bp, Zea mays
gcaagcaaaccatctgatcca

SEQ ID NO: 2819 - DNA, 21 bp, Zea mays
cgcatgggccaagctaagctc

SEQ ID NO: 2820 - DNA, 21 bp, Zea mays
ctgtcattgcaaccaaacgca

SEQ ID NO: 2821 - DNA, 21 bp, Zea mays
tgaatggatgagtcggcagct

SEQ ID NO: 2822 - DNA, 21 bp, Zea mays
ggcctctggcctctttctgat

SEQ ID NO: 2823 - DNA, 21 bp, Zea mays
taccgactgagctagacgggc

SEQ ID NO: 2824 - DNA, 21 bp, Zea mays
ttgtcctgcagagaaacagca

SEQ ID NO: 2825 - DNA, 21 bp, Zea mays
cggatctgggagccgccgcac

SEQ ID NO: 2826 - DNA, 21 bp, Zea mays
ccgtgcctgcttgatagtgcc

SEQ ID NO: 2827 - DNA, 21 bp, Zea mays
cgtatggctggactcgagccc

SEQ ID NO: 2828 - DNA, 21 bp, Zea mays
catgatactgatggttgcaat

SEQ ID NO: 2829 - DNA, 21 bp, Zea mays
gacaaaaaacactcggcaaag

SEQ ID NO: 2830 - DNA, 21 bp, Zea mays
agccttaggccttgttcgttt

SEQ ID NO: 2831 - DNA, 21 bp, Zea mays
ttaaggtcttgttcgtttgtg

SEQ ID NO: 2832 - DNA, 21 bp, Zea mays
tctctgattgagccgtgccaa

SEQ ID NO: 2833 - DNA, 21 bp, Zea mays
acacggaatcgttccagctaa

SEQ ID NO: 2834 - DNA, 21 bp, Zea mays
cacatcaagcgtttgactttc

SEQ ID NO: 2835 - DNA, 21 bp, Zea mays
actgtttgggaacaaagtttt

SEQ ID NO: 2836 - DNA, 21 bp, Zea mays
gacccaaacgaacaaggcctt

SEQ ID NO: 2837 - DNA, 21 bp, Zea mays
gttcgcttgctggttcgccgt

SEQ ID NO: 2838 - DNA, 21 bp, Zea mays
tttttgtcttagggtccgctt

SEQ ID NO: 2839 - DNA, 21 bp, Zea mays
ccgggtcacatcaagcgtttg

SEQ ID NO: 2840 - DNA, 21 bp, Zea mays
ggcacaaacgaacaaggcctt

SEQ ID NO: 2841 - DNA, 21 bp, Zea mays
tttctgcctaaggttagttat

SEQ ID NO: 2842 - DNA, 21 bp, Zea mays
acgtgattggttggttggccg

SEQ ID NO: 2843 - DNA, 21 bp, Zea mays
tagcaatgaggtctgtgccaa

SEQ ID NO: 2844 - DNA, 21 bp, Zea mays
tcgccgacggcggcgccctgg

SEQ ID NO: 2845 - DNA, 21 bp, Zea mays
cgaagccatccgttcagacgc

SEQ ID NO: 2846 - DNA, 21 bp, Zea mays
gcccacaaaagcacggcccac

SEQ ID NO: 2847 - DNA, 21 bp, Zea mays
cccgcaaccaaacacatccta

SEQ ID NO: 2848 - DNA, 21 bp, Zea mays
ttcttttgccgagtgctatgg

SEQ ID NO: 2849 - DNA, 21 bp, Zea mays
tttttgcctaaggttagttat

SEQ ID NO: 2850 - DNA, 21 bp, Zea mays
gggcacactcggcaaagtctc

SEQ ID NO: 2851 - DNA, 21 bp, Zea mays
gatgccttgttcgtttgtgtc

SEQ ID NO: 2852 - DNA, 21 bp, Zea mays
agcttctttgccgagtgtttt

SEQ ID NO: 2853 - DNA, 21 bp, Zea mays
gaaaacactcggcaaagaagc

SEQ ID NO: 2854 - DNA, 21 bp, Zea mays
gcttctttgccgagtgctttt

SEQ ID NO: 2855 - DNA, 21 bp, Zea mays
ggtccccattgccatctctac

SEQ ID NO: 2856 - DNA, 21 bp, Zea mays
atgtttggttcgtggctaact

SEQ ID NO: 2857 - DNA, 21 bp, Zea mays
cgtttaggccttgttcgtttc

SEQ ID NO: 2858 - DNA, 21 bp, Zea mays
cggcagaaacgaacaaggcct

SEQ ID NO: 2859 - DNA, 21 bp, Zea mays
atccggagtctcgttcacgtc

SEQ ID NO: 2860 - DNA, 21 bp, Zea mays
catgcgttgcaacggggacat

SEQ ID NO: 2861 - DNA, 21 bp, Zea mays
aatcccgggtcaccaaatcag

SEQ ID NO: 2862 - DNA, 21 bp, Zea mays
atcctggtttgctgccgggct

SEQ ID NO: 2863 - DNA, 21 bp, Zea mays
gttcactgtctaacttgccac

SEQ ID NO: 2864 - DNA, 21 bp, Zea mays
attgggggggggggggggggg

SEQ ID NO: 2865 - DNA, 21 bp, Zea mays
atgactcccaaactagcccta

SEQ ID NO: 2866 - DNA, 21 bp, Zea mays
ttgactccgtagcaacgcacg

SEQ ID NO: 2867 - DNA, 21 bp, Zea mays
tttggttgcacgcttgcacca

SEQ ID NO: 2868 - DNA, 21 bp, Zea mays
ttgtttggtttctagggacta

SEQ ID NO: 2869 - DNA, 21 bp, Zea mays
taggccttgttcgtttgtgtc

SEQ ID NO: 2870 - DNA, 21 bp, Zea mays
cgacacaaacgaacaaggcct

SEQ ID NO: 2871 - DNA, 21 bp, Zea mays
tcaacacacgttgaaagtctg

SEQ ID NO: 2872 - DNA, 21 bp, Zea mays
attcacttggtgcaaggcggg

SEQ ID NO: 2873 - DNA, 21 bp, Zea mays
gggctcgcttggtgcagatcg

SEQ ID NO: 2874 - DNA, 21 bp, Zea mays
tctaacttgccacactttgcc

SEQ ID NO: 2875 - DNA, 21 bp, Zea mays
agctcggcgccatagatcttg

SEQ ID NO: 2876 - DNA, 21 bp, Zea mays
gcacaaacgaacaaggcctca

SEQ ID NO: 2877 - DNA, 21 bp, Zea mays
gcctgacactcggcaaaggct

SEQ ID NO: 2878 - DNA, 21 bp, Zea mays
tcagcgacggtcatcagcgcc

SEQ ID NO: 2879 - DNA, 21 bp, Zea mays
attacaaccaaacgcaccctt

SEQ ID NO: 2880 - DNA, 21 bp, Zea mays
gattggtctcaaccaaagttt

SEQ ID NO: 2881 - DNA, 21 bp, Zea mays
tttgctcccaaactagcccta

SEQ ID NO: 2882 - DNA, 21 bp, Zea mays
gcatgcctaaccttaggctgt

SEQ ID NO: 2883 - DNA, 21 bp, Zea mays
ataattagccacaaaccaaac

SEQ ID NO: 2884 - DNA, 21 bp, Zea mays
acaggcagctcatccttggct

SEQ ID NO: 2885 - DNA, 21 bp, Zea mays
gactagccaaggagactgcct

SEQ ID NO: 2886 - DNA, 21 bp, Zea mays
cgcatcgtcgcaagtcacaag

SEQ ID NO: 2887 - DNA, 21 bp, Zea mays
tgcgggagatgaaaaagtagg

SEQ ID NO: 2888 - DNA, 21 bp, Zea mays
gggcttgtttggttcgtggct

SEQ ID NO: 2889 - DNA, 21 bp, Zea mays
ttctctggtcaccaaatcagc

SEQ ID NO: 2890 - DNA, 21 bp, Zea mays
gcatcagctgaaaggagcttc

SEQ ID NO: 2891 - DNA, 21 bp, Zea mays
caggcaaccaaacacatccta

SEQ ID NO: 2892 - DNA, 21 bp, Zea mays
acctgcaggtagggtcaatcc

SEQ ID NO: 2893 - DNA, 21 bp, Zea mays
ctggagccgtaccctcatcac

SEQ ID NO: 2894 - DNA, 21 bp, Zea mays
taccgttgcggccttacttgt

SEQ ID NO: 2895 - DNA, 21 bp, Zea mays
tcctctccggtatttggactc

SEQ ID NO: 2896 - DNA, 21 bp, Zea mays
atgacgcacggtcactcacct

SEQ ID NO: 2897 - DNA, 21 bp, Zea mays
ttagacctgtgctttggcgtg

SEQ ID NO: 2898 - DNA, 21 bp, Zea mays
gatcccgggtcaccaaatcag

SEQ ID NO: 2899 - DNA, 21 bp, Zea mays
aatgagattgaggttagacga

SEQ ID NO: 2900 - DNA, 21 bp, Zea mays
cctaacttgccacactttgcc

SEQ ID NO: 2901 - DNA, 21 bp, Zea mays
acggacaaccgactagtctgg

SEQ ID NO: 2902 - DNA, 21 bp, Zea mays
gagcgactccgtcgtcttctc

SEQ ID NO: 2903 - DNA, 21 bp, Zea mays
ctcggctcgtttagctcgcga

SEQ ID NO: 2904 - DNA, 21 bp, Zea mays
cctagaccgcgtctgtggcac

SEQ ID NO: 2905 - DNA, 21 bp, Zea mays
ctcatcctctaaatttagagt

SEQ ID NO: 2906 - DNA, 21 bp, Zea mays
caagatctcggaccaggcttc

SEQ ID NO: 2907 - DNA, 21 bp, Zea mays
ctaactcccaaactagcccta

SEQ ID NO: 2908 - DNA, 21 bp, Zea mays
cgtggatagccctagcatctc

SEQ ID NO: 2909 - DNA, 21 bp, Zea mays
cccgtatccgtatccgaaatt

SEQ ID NO: 2910 - DNA, 21 bp, Zea mays
tgcgatctcagccgtccattc

SEQ ID NO: 2911 - DNA, 21 bp, Zea mays
cggcacaaacgaacaaggcct

SEQ ID NO: 2912 - DNA, 21 bp, Zea mays
tccagttggcctctagcaagt

SEQ ID NO: 2913 - DNA, 21 bp, Zea mays
tctagcagcagtccaaacagc

SEQ ID NO: 2914 - DNA, 21 bp, Zea mays
gttccctgcctaacttgtcac

SEQ ID NO: 2915 - DNA, 21 bp, Zea mays
cgacagaaacgaacaaggcct

SEQ ID NO: 2916 - DNA, 21 bp, Zea mays
ctatcattgcaaccaaacgca

SEQ ID NO: 2917 - DNA, 21 bp, Zea mays
tcaatgggacccgatagccgt

SEQ ID NO: 2918 - DNA, 21 bp, Zea mays
gtcacatcaagcgtttgactt

SEQ ID NO: 2919 - DNA, 21 bp, Zea mays
tctaaaagaaaaaaaaacagc

SEQ ID NO: 2920 - DNA, 21 bp, Zea mays
gacactcggcaaagaacgcga

SEQ ID NO: 2921 - DNA, 21 bp, Zea mays
tggcaaactgtggcaactgag

SEQ ID NO: 2922 - DNA, 21 bp, Zea mays
gtggctgacagaagagagtga

SEQ ID NO: 2923 - DNA, 21 bp, Zea mays
ccaccgtcggacataagctta

SEQ ID NO: 2924 - DNA, 21 bp, Zea mays
aagcagtcggacataagctta

SEQ ID NO: 2925 - DNA, 21 bp, Zea mays
atccctggtcaccaaatcagc

SEQ ID NO: 2926 - DNA, 21 bp, Zea mays
taactcggcgtcatagcctat

SEQ ID NO: 2927 - DNA, 21 bp, Zea mays
accaaacaggccctttgtctt

SEQ ID NO: 2928 - DNA, 21 bp, Zea mays
aagatggcttctacctgcaag

SEQ ID NO: 2929 - DNA, 21 bp, Zea mays
ggacctcccaaactagcccta

SEQ ID NO: 2930 - DNA, 21 bp, Zea mays
ccacgccagcgaatctcgcac

SEQ ID NO: 2931 - DNA, 21 bp, Zea mays
cgtgctgcctcctctgctgag

SEQ ID NO: 2932 - DNA, 21 bp, Zea mays
gccggtgaccctgcgtgcgtg

SEQ ID NO: 2933 - DNA, 21 bp, Zea mays
aacacaaacgaacaaggcctt

SEQ ID NO: 2934 - DNA, 21 bp, Zea mays
tagattgctggagatagccta

SEQ ID NO: 2935 - DNA, 21 bp, Zea mays
gagaggctgcaaacagtctgg

SEQ ID NO: 2936 - DNA, 21 bp, Zea mays
agactgtttgcagcctctcac

SEQ ID NO: 2937 - DNA, 21 bp, Zea mays
gcaggctgtttgcagcccctc

SEQ ID NO: 2938 - DNA, 21 bp, Zea mays
tagtcgccctagtcgacgatt

SEQ ID NO: 2939 - DNA, 21 bp, Zea mays
cttgctcccaaactagcccta

SEQ ID NO: 2940 - DNA, 21 bp, Zea mays
attaggcgcctggtcggtcct

SEQ ID NO: 2941 - DNA, 21 bp, Zea mays
ccgagtgttctttgccgagtg

SEQ ID NO: 2942 - DNA, 21 bp, Zea mays
accagtttcaacggtcgtcat

SEQ ID NO: 2943 - DNA, 21 bp, Zea mays
cttaacttgccacactttgcc

SEQ ID NO: 2944 - DNA, 21 bp, Zea mays
ttgtttggttcgtggctaact

SEQ ID NO: 2945 - DNA, 21 bp, Zea mays
ggctttgttcgtttgcgtcgg

SEQ ID NO: 2946 - DNA, 21 bp, Zea mays
attcccgttgcaacgcacggg

SEQ ID NO: 2947 - DNA, 21 bp, Zea mays
ggaaacccgcagtccaacagt

SEQ ID NO: 2948 - DNA, 21 bp, Zea mays
tcccctccggtatttggactc

SEQ ID NO: 2949 - DNA, 21 bp, Zea mays
ccgtcgtcgtcgcactcacag

SEQ ID NO: 2950 - DNA, 21 bp, Zea mays
ctgtgcgttgcgacggctcac

SEQ ID NO: 2951 - DNA, 21 bp, Zea mays
ttgttgtgagccgtcgcaacg

SEQ ID NO: 2952 - DNA, 21 bp, Zea mays
aaaaacactcggcaaagaagc

SEQ ID NO: 2953 - DNA, 21 bp, Zea mays
ggctagccaaggagactgcct

SEQ ID NO: 2954 - DNA, 21 bp, Zea mays
acataaacgaacaaggcctca

SEQ ID NO: 2955 - DNA, 21 bp, Zea mays
ttgcactcggcaaagtggagt

SEQ ID NO: 2956 - DNA, 21 bp, Zea mays
cctgacactcggcaaagaagc

SEQ ID NO: 2957 - DNA, 21 bp, Zea mays
gacgcagtcacgactcgccta

SEQ ID NO: 2958 - DNA, 21 bp, Zea mays
tctgtaatgggtctggcccag

SEQ ID NO: 2959 - DNA, 21 bp, Zea mays
accgtccactacattgtttgg

SEQ ID NO: 2960 - DNA, 21 bp, Zea mays
gtgggtacccacgttcctaac

SEQ ID NO: 2961 - DNA, 21 bp, Zea mays
gtatttggtttctagggacta

SEQ ID NO: 2962 - DNA, 21 bp, Zea mays
gtaattagccacaaaccaaac

SEQ ID NO: 2963 - DNA, 21 bp, Zea mays
cgtcgcaacgcacgggcacat

SEQ ID NO: 2964 - DNA, 21 bp, Zea mays
cggtacaaacgaacaaggcct

SEQ ID NO: 2965 - DNA, 21 bp, Zea mays
tgtgctcccaaactagcccta

SEQ ID NO: 2966 - DNA, 21 bp, Zea mays
gactatgacgccgagaaaagg

SEQ ID NO: 2967 - DNA, 21 bp, Zea mays
gtgtgccttctttgccgagtg

SEQ ID NO: 2968 - DNA, 21 bp, Zea mays
atggctcccaaactagcccta

SEQ ID NO: 2969 - DNA, 21 bp, Zea mays
acgattcctaaccggattgct

SEQ ID NO: 2970 - DNA, 21 bp, Zea mays
gtctgacggcttagcagaggc

SEQ ID NO: 2971 - DNA, 21 bp, Zea mays
atagcccgtcagcctgctagt

SEQ ID NO: 2972 - DNA, 21 bp, Zea mays
caaccctatatccagtgtctc

SEQ ID NO: 2973 - DNA, 21 bp, Zea mays
gagcctttgccgagtgccttt

SEQ ID NO: 2974 - DNA, 21 bp, Zea mays
ctaaggtcttgttcgtttgtg

SEQ ID NO: 2975 - DNA, 21 bp, Zea mays
acagttagccacaaaccaaac

SEQ ID NO: 2976 - DNA, 21 bp, Zea mays
gtgtgccttctttgtcgagtg

SEQ ID NO: 2977 - DNA, 21 bp, Zea mays
ccctccggttttgtggctctc

SEQ ID NO: 2978 - DNA, 21 bp, Zea mays
ggctgagcccaccggcactta

SEQ ID NO: 2979 - DNA, 21 bp, Zea mays
cgacgcaaacgaacaaggcct

SEQ ID NO: 2980 - DNA, 21 bp, Zea mays
tgatctaaggccctatttggg

SEQ ID NO: 2981 - DNA, 21 bp, Zea mays
gacacaaacgaacaaggcctt

SEQ ID NO: 2982 - DNA, 21 bp, Zea mays
aaggccttgttcgtttgtgtc

SEQ ID NO: 2983 - DNA, 21 bp, Zea mays
gtaagaacgtgggtacccacg

SEQ ID NO: 2984 - DNA, 21 bp, Zea mays
caccttaggccttgttcggtt

SEQ ID NO: 2985 - DNA, 21 bp, Zea mays
atcgccgttgctccagcacgc

SEQ ID NO: 2986 - DNA, 21 bp, Zea mays
catatgggccggtctggcaca

SEQ ID NO: 2987 - DNA, 21 bp, Zea mays
cccaatcaccaaatcagctct

SEQ ID NO: 2988 - DNA, 21 bp, Zea mays
cgtcttcacctgattcttggg

SEQ ID NO: 2989 - DNA, 21 bp, Zea mays
cgggttgtttggttcgtggct

SEQ ID NO: 2990 - DNA, 21 bp, Zea mays
gggctgcaaacggcctggttt

SEQ ID NO: 2991 - DNA, 21 bp, Zea mays
gtgtcacactttgcctaaggt

SEQ ID NO: 2992 - DNA, 21 bp, Zea mays
gtccccgttgcaacgcacggg

SEQ ID NO: 2993 - DNA, 21 bp, Zea mays
tcacagatggaccgtgagaaa

SEQ ID NO: 2994 - DNA, 21 bp, Zea mays
ctatttggttcgtggctaact

SEQ ID NO: 2995 - DNA, 21 bp, Zea mays
atagttagccacaaaccaaac

SEQ ID NO: 2996 - DNA, 21 bp, Zea mays
cgccgttgacagtgtcgtcga

SEQ ID NO: 2997 - DNA, 21 bp, Zea mays
tctcgcaaccgaacaagccct

SEQ ID NO: 2998 - DNA, 21 bp, Zea mays
aagaccttgttcgtttgtgtc

SEQ ID NO: 2999 - DNA, 21 bp, Zea mays
agcacaaacgaacaaggcctt

SEQ ID NO: 3000 - DNA, 21 bp, Zea mays
ttccgttgcaacgcacgagca

SEQ ID NO: 3001 - DNA, 21 bp, Zea mays
gggtttggtttctagggacta

SEQ ID NO: 3002 - DNA, 21 bp, Zea mays
tctgatcaccaaatcagctct

SEQ ID NO: 3003 - DNA, 21 bp, Zea mays
gaggctcccaaactagcccta

SEQ ID NO: 3004 - DNA, 21 bp, Zea mays
tgtcatcctgtatcctaccct

SEQ ID NO: 3005 - DNA, 21 bp, Zea mays
aagctctttgccgagtgtttt

SEQ ID NO: 3006 - DNA, 21 bp, Zea mays
aaacgatctggtgcatccgat

SEQ ID NO: 3007 - DNA, 21 bp, Zea mays
caaagccgaccgatatggttg

SEQ ID NO: 3008 - DNA, 21 bp, Zea mays
tagggctcgctggttgtcgtc

SEQ ID NO: 3009 - DNA, 21 bp, Zea mays
gtgcttggtttctagggacta

SEQ ID NO: 3010 - DNA, 21 bp, Zea mays
agcaggtcggtcggtcggtcg

SEQ ID NO: 3011 - DNA, 21 bp, Zea mays
cggcggtcaaaccggtcggtt

SEQ ID NO: 3012 - DNA, 21 bp, Zea mays
ctggctcccatggtcaagttg

SEQ ID NO: 3013 - DNA, 21 bp, Zea mays
gattgcagccgcagcaagccg

SEQ ID NO: 3014 - DNA, 21 bp, Zea mays
agaacggagccgctctgttct

SEQ ID NO: 3015 - DNA, 21 bp, Zea mays
aggctttgttcgtttgtgccg

SEQ ID NO: 3016 - DNA, 21 bp, Zea mays
gtagccaagaacaacttgccg

SEQ ID NO: 3017 - DNA, 21 bp, Zea mays
agtccggcttcgacgaattgg

SEQ ID NO: 3018 - DNA, 21 bp, Zea mays
aaatatagatgaccaaacggt

SEQ ID NO: 3019 - DNA, 21 bp, Zea mays
agttgagagctaaccgaacaa

SEQ ID NO: 3020 - DNA, 21 bp, Zea mays
atatgggccttttcgggcttg

SEQ ID NO: 3021 - DNA, 21 bp, Zea mays
aaccaactgagctaataggcc

SEQ ID NO: 3022 - DNA, 21 bp, Zea mays
tgctaaagtttagtccgggtc

SEQ ID NO: 3023 - DNA, 21 bp, Zea mays
cacaacactcggcaaagaagc

SEQ ID NO: 3024 - DNA, 21 bp, Zea mays
ccgcacactgccaaagcaact

SEQ ID NO: 3025 - DNA, 21 bp, Zea mays
ttagacactcggcaaagaagc

SEQ ID NO: 3026 - DNA, 21 bp, Zea mays
gccttggcactcggcaaagaa

SEQ ID NO: 3027 - DNA, 21 bp, Zea mays
agacaatttgtcgagcgcttg

SEQ ID NO: 3028 - DNA, 21 bp, Zea mays
acgtttggttcgtggctaact

SEQ ID NO: 3029 - DNA, 21 bp, Zea mays
gcgctttgtcgagtgcttttt

SEQ ID NO: 3030 - DNA, 21 bp, Zea mays
tagcaatttagagactaagat

SEQ ID NO: 3031 - DNA, 21 bp, Zea mays
atcctacggcttgctcgcacg

SEQ ID NO: 3032 - DNA, 21 bp, Zea mays
ataaactttgccgagtgtctg

SEQ ID NO: 3033 - DNA, 21 bp, Zea mays
cactaccggaatccggctctt

SEQ ID NO: 3034 - DNA, 21 bp, Zea mays
cctcagccaggcccgtgggat

SEQ ID NO: 3035 - DNA, 21 bp, Zea mays
tccgcaagaccttaatcatgt

SEQ ID NO: 3036 - DNA, 21 bp, Zea mays
ttttgctcagctgtgcccttc

SEQ ID NO: 3037 - DNA, 21 bp, Zea mays
ccgtcggtttagcccttattc

SEQ ID NO: 3038 - DNA, 21 bp, Zea mays
acgggaataagggctaaaccg

SEQ ID NO: 3039 - DNA, 21 bp, Zea mays
gaatcaaacgtgcttagcgca

SEQ ID NO: 3040 - DNA, 21 bp, Zea mays
gcagatcaggtctgattccca

SEQ ID NO: 3041 - DNA, 21 bp, Zea mays
tttgttcctgtcaccaaagtt

SEQ ID NO: 3042 - DNA, 21 bp, Zea mays
cacgtcggagacctaggcggc

SEQ ID NO: 3043 - DNA, 21 bp, Zea mays
cgccgaggcggcgccgcggcg

SEQ ID NO: 3044 - DNA, 21 bp, Zea mays
ttaagaacgtgggtacccacg

SEQ ID NO: 3045 - DNA, 21 bp, Zea mays
agcgcgctcagcagaggtcga

SEQ ID NO: 3046 - DNA, 21 bp, Zea mays
ggaacagagcggcttcatcct

SEQ ID NO: 3047 - DNA, 21 bp, Zea mays
ggacaactggggacaacactg

SEQ ID NO: 3048 - DNA, 21 bp, Zea mays
cttccatgcgcaaaatgcatc

SEQ ID NO: 3049 - DNA, 21 bp, Zea mays
gctccatgcgcaaaatgcatc

SEQ ID NO: 3050 - DNA, 21 bp, Zea mays
aggcattgttggagatgctct

SEQ ID NO: 3051 - DNA, 21 bp, Zea mays
  unsure (1): n = A, C, G or T
ntgtttggtttctagggacta

SEQ ID NO: 3052 - DNA, 21 bp, Zea mays
tagcccttgttcgtttgtgtc

SEQ ID NO: 3053 - DNA, 21 bp, Zea mays
cttgccagacgagtcgtacac

SEQ ID NO: 3054 - DNA, 21 bp, Zea mays
tttctgattgagccgtgccaa

SEQ ID NO: 3055 - DNA, 21 bp, Zea mays
ctgtttggtttctagggacta

SEQ ID NO: 3056 - DNA, 21 bp, Zea mays
agtgaagctgcaacatgatct

SEQ ID NO: 3057 - DNA, 21 bp, Zea mays
gactaaagtttagtccgggtc

SEQ ID NO: 3058 - DNA, 21 bp, Zea mays
gggcacgacactaaaaagcac

SEQ ID NO: 3059 - DNA, 21 bp, Zea mays
gaggtgctactcggaagtcct

SEQ ID NO: 3060 - DNA, 21 bp, Zea mays
agcttaggccttgttcgtttc

SEQ ID NO: 3061 - DNA, 21 bp, Zea mays
cgatagaaacgaacaaggcct

SEQ ID NO: 3062 - DNA, 21 bp, Zea mays
  unsure (1)..(2)..(3): n = A, C, G or T
nnntgcaaccgaacaagccct

SEQ ID NO: 3063 - DNA, 21 bp, Zea mays
ggtgcttgttggacacagtct

SEQ ID NO: 3064 - DNA, 21 bp, Zea mays
ggacacgcagtcacaactcac

SEQ ID NO: 3065 - DNA, 21 bp, Zea mays
ccgcgtgttttggtccgatcc

SEQ ID NO: 3066 - DNA, 21 bp, Zea mays
taaagaacgtgggtacccacg

SEQ ID NO: 3067 - DNA, 21 bp, Zea mays
atggctggccaagtcaccctc

SEQ ID NO: 3068 - DNA, 21 bp, Zea mays
tttcttcaattctcttgccac

SEQ ID NO: 3069 - DNA, 21 bp, Zea mays
ttggtgccctcagttttgatg

SEQ ID NO: 3070 - DNA, 21 bp, Zea mays
tccatttggcacgaagcacga

SEQ ID NO: 3071 - DNA, 21 bp, Zea mays
acgagcattttgtccagccct

SEQ ID NO: 3072 - DNA, 21 bp, Zea mays
ctcggcgccatagcctatggc

SEQ ID NO: 3073 - DNA, 21 bp, Zea mays
tgctcggcgccataggctatg

SEQ ID NO: 3074 - DNA, 21 bp, Zea mays
tgaaccgtcgcaacgcacggg

SEQ ID NO: 3075 - DNA, 21 bp, Zea mays
gtgtctcccaaactagcccta

SEQ ID NO: 3076 - DNA, 21 bp, Zea mays
aatctatggcgccgagctcgg

SEQ ID NO: 3077 - DNA, 21 bp, Zea mays
acctcggcgccataggctatg

SEQ ID NO: 3078 - DNA, 21 bp, Zea mays
ctgtctcccttcccataagca

SEQ ID NO: 3079 - DNA, 21 bp, Zea mays
ttcacaagcggaccctaagac

SEQ ID NO: 3080 - DNA, 21 bp, Zea mays
tatgtgggccggtctggcaca

SEQ ID NO: 3081 - DNA, 21 bp, Zea mays
cagtttcaacggtcgtcgtgc

SEQ ID NO: 3082 - DNA, 21 bp, Zea mays
ctctttaggccttgttcgttt

SEQ ID NO: 3083 - DNA, 21 bp, Zea mays
ttctgcctaaggttagttctt

SEQ ID NO: 3084 - DNA, 21 bp, Zea mays
cacacgtgcaagtccaatgcg

SEQ ID NO: 3085 - DNA, 21 bp, Zea mays
atactcggcgccataggctgt

SEQ ID NO: 3086 - DNA, 21 bp, Zea mays
aattggggggggggggggggg

SEQ ID NO: 3087 - DNA, 21 bp, Zea mays
gttcccgttgcaacgcacggg

SEQ ID NO: 3088 - DNA, 21 bp, Zea mays
gcgcccgctccactccacttc

SEQ ID NO: 3089 - DNA, 21 bp, Zea mays
gccaccattccggttctgcca

SEQ ID NO: 3090 - DNA, 21 bp, Zea mays
gtgattggtttctagggacta

SEQ ID NO: 3091 - DNA, 21 bp, Zea mays
acgaatcgcgggctgggccgt

SEQ ID NO: 3092 - DNA, 21 bp, Zea mays
cttaggccctgtttggcacag

SEQ ID NO: 3093 - DNA, 21 bp, Zea mays
ctcgacaaaggctctgtcacc

SEQ ID NO: 3094 - DNA, 21 bp, Zea mays
tttaggtcttgttcgtttgtg

SEQ ID NO: 3095 - DNA, 21 bp, Zea mays
ccgcgaagtcagtcttgctgc

SEQ ID NO: 3096 - DNA, 21 bp, Zea mays
gtagctcccaaactagcccta

SEQ ID NO: 3097 - DNA, 21 bp, Zea mays
atctggtgagcctggctcagg

SEQ ID NO: 3098 - DNA, 21 bp, Zea mays
cgccgagccaatacttagtcc

SEQ ID NO: 3099 - DNA, 21 bp, Zea mays
attgaactcgggacctctcgc

SEQ ID NO: 3100 - DNA, 21 bp, Zea mays
taattgattgagccgtgccaa

SEQ ID NO: 3101 - DNA, 21 bp, Zea mays
aatcgcaggcgctagctcatc

SEQ ID NO: 3102 - DNA, 21 bp, Zea mays
acatttagccacaaaccaaac

SEQ ID NO: 3103 - DNA, 21 bp, Zea mays
agctacaaaccaaacaggccc

SEQ ID NO: 3104 - DNA, 21 bp, Zea mays
ggataactggggacaacactg

SEQ ID NO: 3105 - DNA, 21 bp, Zea mays
tcctaatccaccttaacacat

SEQ ID NO: 3106 - DNA, 21 bp, Zea mays
actaaggccctgttcggtttc

SEQ ID NO: 3107 - DNA, 21 bp, Zea mays
tcaagtgttctttgccgagtg

SEQ ID NO: 3108 - DNA, 21 bp, Zea mays
actatggattctcaggcgcca

SEQ ID NO: 3109 - DNA, 21 bp, Zea mays
cccgcaaccaaacgcaccctt

SEQ ID NO: 3110 - DNA, 21 bp, Zea mays
tcgctcatccgagcctgctct

SEQ ID NO: 3111 - DNA, 21 bp, Zea mays
tccccccagatctagcgtgtc

SEQ ID NO: 3112 - DNA, 21 bp, Zea mays
atgtccctgtgaatcacgtgc

SEQ ID NO: 3113 - DNA, 21 bp, Zea mays
aaagggacggccttttcgatc

SEQ ID NO: 3114 - DNA, 21 bp, Zea mays
ccgttctgtcccagttttgtt

SEQ ID NO: 3115 - DNA, 21 bp, Zea mays
acccggaatcgttccagctaa

SEQ ID NO: 3116 - DNA, 21 bp, Zea mays
gttatggcactcggcaaagaa

SEQ ID NO: 3117 - DNA, 21 bp, Zea mays
ccgacgcgaacccgccgcccg

SEQ ID NO: 3118 - DNA, 21 bp, Zea mays
ttggttctttgccgagtgcca

SEQ ID NO: 3119 - DNA, 21 bp, Zea mays
tactccctccatttcttttta

SEQ ID NO: 3120 - DNA, 21 bp, Zea mays
ctcggcgtcataggctatggc

SEQ ID NO: 3121 - DNA, 21 bp, Zea mays
gtatagatggccaaacgggcc

SEQ ID NO: 3122 - DNA, 21 bp, Zea mays
atatagagcgcgacgcaaacg

SEQ ID NO: 3123 - DNA, 21 bp, Zea mays
ctttaggccctgttcggtttc

SEQ ID NO: 3124 - DNA, 21 bp, Zea mays
accaggaatcgttccagctaa

SEQ ID NO: 3125 - DNA, 21 bp, Zea mays
gtttccgttgcaacgcacggg

SEQ ID NO: 3126 - DNA, 21 bp, Zea mays
tttttttgtcgagtgcttttt

SEQ ID NO: 3127 - DNA, 21 bp, Zea mays
agacacaaaccaaacaggccc

SEQ ID NO: 3128 - DNA, 21 bp, Zea mays
gacccacagcatagtgtttag

SEQ ID NO: 3129 - DNA, 21 bp, Zea mays
atttgatgatggcgcacagtg

SEQ ID NO: 3130 - DNA, 21 bp, Zea mays
ttagcaggtagcaagaacggg

SEQ ID NO: 3131 - DNA, 21 bp, Zea mays
cgtggcaacgcacgggcacat

SEQ ID NO: 3132 - DNA, 21 bp, Zea mays
tcgagtagcacctccaagtcc

SEQ ID NO: 3133 - DNA, 21 bp, Zea mays
cagcctaccccttacagcctt

SEQ ID NO: 3134 - DNA, 21 bp, Zea mays
tgcacgctccaccactctgtg

SEQ ID NO: 3135 - DNA, 21 bp, Zea mays
gccacgtaagtcgctactgac

SEQ ID NO: 3136 - DNA, 21 bp, Zea mays
cctaaggccctgttcggtttc

SEQ ID NO: 3137 - DNA, 21 bp, Zea mays
gtagccaaggacaacttgccg

SEQ ID NO: 3138 - DNA, 21 bp, Zea mays
cggtcaccaatggacgcacaa

SEQ ID NO: 3139 - DNA, 21 bp, Zea mays
ttgctcggcgccataggctgt

SEQ ID NO: 3140 - DNA, 21 bp, Zea mays
ggtgctcctcgtcgctggtga

SEQ ID NO: 3141 - DNA, 21 bp, Zea mays
catattagccacaaaccaaac

SEQ ID NO: 3142 - DNA, 21 bp, Zea mays
taaacttagacaaagtgtggc

SEQ ID NO: 3143 - DNA, 21 bp, Zea mays
gacccacagcacagtgtttag

SEQ ID NO: 3144 - DNA, 21 bp, Zea mays
ggcggcacatcacctgccagt

SEQ ID NO: 3145 - DNA, 21 bp, Zea mays
gttttgtcttagggtccgctt

SEQ ID NO: 3146 - DNA, 21 bp, Zea mays
caccagcctcggcaatgcaga

SEQ ID NO: 3147 - DNA, 21 bp, Zea mays
acgcctctactgctgacggga

SEQ ID NO: 3148 - DNA, 21 bp, Zea mays
gtcagcaaaccatctgatcca

SEQ ID NO: 3149 - DNA, 21 bp, Zea mays
cgtgcaccgtagagaaatgtg

SEQ ID NO: 3150 - DNA, 21 bp, Zea mays
ccttccggttttgtggctctc

SEQ ID NO: 3151 - DNA, 21 bp, Zea mays
ccatgctctgtctcatccctg

SEQ ID NO: 3152 - DNA, 21 bp, Zea mays
taacttatgtccgacggctgt

SEQ ID NO: 3153 - DNA, 21 bp, Zea mays
tgtttggttgcctgcacaagg

SEQ ID NO: 3154 - DNA, 21 bp, Zea mays
tgtttcccgcggcatcatgtt

SEQ ID NO: 3155 - DNA, 21 bp, Zea mays
gccgggccggcccggcccaag

SEQ ID NO: 3156 - DNA, 21 bp, Zea mays
taacacaaacgaacaaggcct

SEQ ID NO: 3157 - DNA, 21 bp, Zea mays
agattctttgccgagtgtttt

SEQ ID NO: 3158 - DNA, 21 bp, Zea mays
tgacgccgccggcgccgccgt

SEQ ID NO: 3159 - DNA, 21 bp, Zea mays
gccttccaccctctagccaac

SEQ ID NO: 3160 - DNA, 21 bp, Zea mays
atgtcattgcaaccaaacgca

SEQ ID NO: 3161 - DNA, 21 bp, Zea mays
tctggcacagctcctgcagcc

SEQ ID NO: 3162 - DNA, 21 bp, Zea mays
gcacattgttggagatgctct

SEQ ID NO: 3163 - DNA, 21 bp, Zea mays
tcgtttggtttctagggacta

SEQ ID NO: 3164 - DNA, 21 bp, Zea mays
atatactttgccgagtgtctg

SEQ ID NO: 3165 - DNA, 21 bp, Zea mays
acaccgaaccaaacacatcat

SEQ ID NO: 3166 - DNA, 21 bp, Zea mays
ggttccgtcgcaacgcacggg

SEQ ID NO: 3167 - DNA, 21 bp, Zea mays
ttgcaacgcacggacactcac

SEQ ID NO: 3168 - DNA, 21 bp, Zea mays
atctcggcgccataggctatg

SEQ ID NO: 3169 - DNA, 21 bp, Zea mays
  unsure (1)..(2): n = A, C, G or T
nncggcgccatagcctatggc

SEQ ID NO: 3170 - DNA, 21 bp, Zea mays
  unsure (1): n = A, C, G or T
nacctcaggcgacccccgcgg

SEQ ID NO: 3171 - DNA, 21 bp, Zea mays
ccgtttaactggtcacgttct

SEQ ID NO: 3172 - DNA, 21 bp, Zea mays
cccgactcatcctactttgac

SEQ ID NO: 3173 - DNA, 21 bp, Zea mays
aattgagtgcagcgctggtga

SEQ ID NO: 3174 - DNA, 21 bp, Zea mays
acgattaggcactatagtgta

SEQ ID NO: 3175 - DNA, 21 bp, Zea mays
ccatacccgcgagacaaaact

SEQ ID NO: 3176 - DNA, 21 bp, Zea mays
ttcccacccggtcaaagcacg

SEQ ID NO: 3177 - DNA, 21 bp, Zea mays
aatttggctctttgccgagtg

SEQ ID NO: 3178 - DNA, 21 bp, Zea mays
gattaccaacgcaacctgatc

SEQ ID NO: 3179 - DNA, 21 bp, Zea mays
tcatctcaatccatgtggatt

SEQ ID NO: 3180 - DNA, 21 bp, Zea mays
cttttgcaggcttgcagctct

SEQ ID NO: 3181 - DNA, 21 bp, Zea mays
aaattctttgccgagtgtttt

SEQ ID NO: 3182 - DNA, 21 bp, Zea mays
gagcgaagtcctacaggcctt

SEQ ID NO: 3183 - DNA, 21 bp, Zea mays
attgcaaccaaacacatccta

SEQ ID NO: 3184 - DNA, 21 bp, Zea mays
taaagcgccacaatctgccta

SEQ ID NO: 3185 - DNA, 21 bp, Zea mays
cgtcgtcgatctgcgcagttc

SEQ ID NO: 3186 - DNA, 21 bp, Zea mays
tgtagcctctaggaagttagc

SEQ ID NO: 3187 - DNA, 21 bp, Zea mays
taccgtgcgcgccaggtcacc

SEQ ID NO: 3188 - DNA, 21 bp, Zea mays
tgaactcccaaactagcccta

SEQ ID NO: 3189 - DNA, 21 bp, Zea mays
agattgtgccgtgctagcacc

SEQ ID NO: 3190 - DNA, 21 bp, Zea mays
agccgacaaactgtttgccac

SEQ ID NO: 3191 - DNA, 21 bp, Zea mays
taaggcgccacaatctgccta

SEQ ID NO: 3192 - DNA, 21 bp, Zea mays
ctagcctgtctcgtgcgatac

SEQ ID NO: 3193 - DNA, 21 bp, Zea mays
aaaaaaaaacactcggcaaag

SEQ ID NO: 3194 - DNA, 21 bp, Zea mays
gccgagcaaagggtccaaaac

SEQ ID NO: 3195 - DNA, 21 bp, Zea mays
tgtaagctcgctcgactcgtg

SEQ ID NO: 3196 - DNA, 21 bp, Zea mays
tttacgtcggattgcacccgg

SEQ ID NO: 3197 - DNA, 21 bp, Zea mays
ccctttgctcggcgccatagg

SEQ ID NO: 3198 - DNA, 21 bp, Zea mays
cgaaccgcctgtgatgtaaaa

SEQ ID NO: 3199 - DNA, 21 bp, Zea mays
gtgtaccgtcgcaacgcacgg

SEQ ID NO: 3200 - DNA, 21 bp, Zea mays
tgcgacactcggcaaaggctt

SEQ ID NO: 3201 - DNA, 21 bp, Zea mays
agacaagcagctcgtcctcga

SEQ ID NO: 3202 - DNA, 21 bp, Zea mays
taaacttaggcaaagtgtggc

SEQ ID NO: 3203 - DNA, 21 bp, Zea mays
ttaggaacgtgggtacccacg

SEQ ID NO: 3204 - DNA, 21 bp, Zea mays
tagaccttgttcgtttgtgtc

SEQ ID NO: 3205 - DNA, 21 bp, Zea mays
ctcgtacacgcacccgctacc

SEQ ID NO: 3206 - DNA, 21 bp, Zea mays
ggtagctcgtttagctcgcga

SEQ ID NO: 3207 - DNA, 21 bp, Zea mays
ctaaatttgcacgcccacagc

SEQ ID NO: 3208 - DNA, 21 bp, Zea mays
taagccttgttcgtttgtgtc

SEQ ID NO: 3209 - DNA, 21 bp, Zea mays
tggacacgtgtcccgccagtc

SEQ ID NO: 3210 - DNA, 21 bp, Zea mays
ttaggtgcaagagattttttc

SEQ ID NO: 3211 - DNA, 21 bp, Zea mays
taaagggggctttgccgagtg

SEQ ID NO: 3212 - DNA, 21 bp, Zea mays
cagacggtcaaacgagccgct

SEQ ID NO: 3213 - DNA, 21 bp, Zea mays
ctaacttatcacactttgcct

SEQ ID NO: 3214 - DNA, 21 bp, Zea mays
tataaggccctgttcggtttc

SEQ ID NO: 3215 - DNA, 21 bp, Zea mays
ctaagcaacgcacgggcacat

SEQ ID NO: 3216 - DNA, 21 bp, Zea mays
tgcaagcgtgcaagcagactt

SEQ ID NO: 3217 - DNA, 21 bp, Zea mays
caccggaatcgttccagctaa

SEQ ID NO: 3218 - DNA, 21 bp, Zea mays
gcccaccaaatcctggctagt

SEQ ID NO: 3219 - DNA, 21 bp, Zea mays
gtcggcgccatagatcttggc

SEQ ID NO: 3220 - DNA, 21 bp, Zea mays
ggtcggcgccaagatctatgg

SEQ ID NO: 3221 - DNA, 21 bp, Zea mays
taatggccctgtttggcacag

SEQ ID NO: 3222 - DNA, 21 bp, Zea mays
aaccttaggccttgttcgttt

SEQ ID NO: 3223 - DNA, 21 bp, Zea mays
cagtttcaatggtcgtcctgc

SEQ ID NO: 3224 - DNA, 21 bp, Zea mays
gaggggctgcaaacagtctgg

SEQ ID NO: 3225 - DNA, 21 bp, Zea mays
aagtcttcgaccgagcacttg

SEQ ID NO: 3226 - DNA, 21 bp, Zea mays
catcactgcggcctgtcagtt

SEQ ID NO: 3227 - DNA, 21 bp, Zea mays
taacgtaggtccgcccctgat

SEQ ID NO: 3228 - DNA, 21 bp, Zea mays
tcatgccggcctgctaactgt

SEQ ID NO: 3229 - DNA, 21 bp, Zea mays
gcgtttggtttctagggacta

SEQ ID NO: 3230 - DNA, 21 bp, Zea mays
tttgccgttgcaacgcacggg

SEQ ID NO: 3231 - DNA, 21 bp, Zea mays
attacaaccaaacacatccta

SEQ ID NO: 3232 - DNA, 21 bp, Zea mays
tggacgttgacgctccgttct

SEQ ID NO: 3233 - DNA, 21 bp, Zea mays
agatattgttggagatgctct

SEQ ID NO: 3234 - DNA, 21 bp, Zea mays
gacgtgacacgtgagtgggat

SEQ ID NO: 3235 - DNA, 21 bp, Zea mays
acgtgctggcacaagtacggt

SEQ ID NO: 3236 - DNA, 21 bp, Zea mays
ctaatccctcgcctacgcctc

SEQ ID NO: 3237 - DNA, 21 bp, Zea mays
attcctggtcaccaaatcagc

SEQ ID NO: 3238 - DNA, 21 bp, Zea mays
acgtagtgtaggcgtgcacac

SEQ ID NO: 3239 - DNA, 21 bp, Zea mays
gctcgcgagctggctcgttaa

SEQ ID NO: 3240 - DNA, 21 bp, Zea mays
atttccgttgcaacgcacggg

SEQ ID NO: 3241 - DNA, 21 bp, Zea mays
ttgacactcggcaaagtcttt

SEQ ID NO: 3242 - DNA, 21 bp, Zea mays
gttggctcgtttagctcgcga

SEQ ID NO: 3243 - DNA, 21 bp, Zea mays
actaacttgccacactttgcc

SEQ ID NO: 3244 - DNA, 21 bp, Zea mays
gcgaggcagtctggttggcac

SEQ ID NO: 3245 - DNA, 21 bp, Zea mays
ggagtgacttggccgtccatc

SEQ ID NO: 3246 - DNA, 21 bp, Zea mays
acggcttgttcggttagctct

SEQ ID NO: 3247 - DNA, 21 bp, Zea mays
gagctcggcgccatagatctt

SEQ ID NO: 3248 - DNA, 21 bp, Zea mays
ctcggcgccatagatcttggc

SEQ ID NO: 3249 - DNA, 21 bp, Zea mays
tggctccacatctgcacgcag

SEQ ID NO: 3250 - DNA, 21 bp, Zea mays
taaaccttgttcgtttgtgtc

SEQ ID NO: 3251 - DNA, 21 bp, Zea mays
acgtaaacgaacaaggcctca

SEQ ID NO: 3252 - DNA, 21 bp, Zea mays
gggtcctatcgggtcggatac

SEQ ID NO: 3253 - DNA, 21 bp, Zea mays
catccaatggtgctgcgtcag

SEQ ID NO: 3254 - DNA, 21 bp, Zea mays
ataccctccacatccaatggt

SEQ ID NO: 3255 - DNA, 21 bp, Zea mays
tttaggccctgtttggcacag

SEQ ID NO: 3256 - DNA, 21 bp, Zea mays
tttctacctaaggttagttat

SEQ ID NO: 3257 - DNA, 21 bp, Zea mays
gcgacccaccatcagtcacac

SEQ ID NO: 3258 - DNA, 21 bp, Zea mays
ttcaatagccgtgccgggctt

SEQ ID NO: 3259 - DNA, 21 bp, Zea mays
ggctgcctctaggaagttagc

SEQ ID NO: 3260 - DNA, 21 bp, Zea mays
acctgcgcacgccggaaacct

SEQ ID NO: 3261 - DNA, 21 bp, Zea mays
ttcccatgcgcaaaatgcatc

SEQ ID NO: 3262 - DNA, 21 bp, Zea mays
gagctcggcgtcatagcctat

SEQ ID NO: 3263 - DNA, 21 bp, Zea mays
gcagcaaccaaacaccctctt

SEQ ID NO: 3264 - DNA, 21 bp, Zea mays
ctcaccggttgtcgtcgttcg

SEQ ID NO: 3265 - DNA, 21 bp, Zea mays
cgtcccagcgcacaagaattc

SEQ ID NO: 3266 - DNA, 21 bp, Zea mays
acacaaaccaaacaggcccat

SEQ ID NO: 3267 - DNA, 21 bp, Zea mays
aacactcggcaaaggctttgc

SEQ ID NO: 3268 - DNA, 21 bp, Zea mays
aaccggaatcgttccagctaa

SEQ ID NO: 3269 - DNA, 21 bp, Zea mays
ttccctggtcaccaaatcagc

SEQ ID NO: 3270 - DNA, 21 bp, Zea mays
gccttgtttggcacagctgct

SEQ ID NO: 3271 - DNA, 21 bp, Zea mays
cgatacaaacgaacaaggcct

SEQ ID NO: 3272 - DNA, 21 bp, Zea mays
tacctcaggcgacccccgcgg

SEQ ID NO: 3273 - DNA, 21 bp, Zea mays
gccgtggccgacgacgacgat

SEQ ID NO: 3274 - DNA, 21 bp, Zea mays
ccaagtcgaccccaagcgcgg

SEQ ID NO: 3275 - DNA, 21 bp, Zea mays
ttggagagtctgttagaatga

SEQ ID NO: 3276 - DNA, 21 bp, Zea mays
tagtccttgttcgtttgtgtc

SEQ ID NO: 3277 - DNA, 21 bp, Zea mays
gtcacaaacgaacaaggcctt

SEQ ID NO: 3278 - DNA, 21 bp, Zea mays
ccgacccacacacatagtcta

SEQ ID NO: 3279 - DNA, 21 bp, Zea mays
cgtgtgccctcagttttgctg

SEQ ID NO: 3280 - DNA, 21 bp, Zea mays
tccctccgtttctttttattt

SEQ ID NO: 3281 - DNA, 21 bp, Zea mays
agtattaaatatggtctaatt

SEQ ID NO: 3282 - DNA, 21 bp, Zea mays
cctaatcctaaaccatttgga

SEQ ID NO: 3283 - DNA, 21 bp, Zea mays
tcgcgactcagcttcagcctc

SEQ ID NO: 3284 - DNA, 21 bp, Zea mays
gtgctcgctctcttctgtcaa

SEQ ID NO: 3285 - DNA, 21 bp, Zea mays
gccgcttcccggcctcctcct

SEQ ID NO: 3286 - DNA, 21 bp, Zea mays
ggacccacaaatcatagacac

SEQ ID NO: 3287 - DNA, 21 bp, Zea mays
ctgctggattggtgggtcgga

SEQ ID NO: 3288 - DNA, 21 bp, Zea mays
cccctccgtttctttttattt

SEQ ID NO: 3289 - DNA, 21 bp, Zea mays
gtcaaattataaaactaattt

SEQ ID NO: 3290 - DNA, 21 bp, Zea mays
ggactagccaaggagactgcc

SEQ ID NO: 3291 - DNA, 21 bp, Zea mays
cattctgcgatctcagccgtc

SEQ ID NO: 3292 - DNA, 21 bp, Zea mays
cgtccgccctatccccgcgac

SEQ ID NO: 3293 - DNA, 21 bp, Zea mays
ctcagcgccacagcctatggc

SEQ ID NO: 3294 - DNA, 21 bp, Zea mays
agctcggcgccataggctgtg

SEQ ID NO: 3295 - DNA, 21 bp, Zea mays
gttagccacgaaccaaacagg

SEQ ID NO: 3296 - DNA, 21 bp, Zea mays
acctgtttggttcgtggctaa

SEQ ID NO: 3297 - DNA, 21 bp, Zea mays
gagtctatcctcatttttgtg

SEQ ID NO: 3298 - DNA, 21 bp, Zea mays
tgcatcatgggtccattcctc

SEQ ID NO: 3299 - DNA, 21 bp, Zea mays
accgcatccgacgacgacgcc

SEQ ID NO: 3300 - DNA, 21 bp, Zea mays
cacagatcttggcgccgagct

SEQ ID NO: 3301 - DNA, 21 bp, Zea mays
gccgccggcatcgaggcagga

SEQ ID NO: 3302 - DNA, 21 bp, Zea mays
taccgttgcaacgcacgggca

SEQ ID NO: 3303 - DNA, 21 bp, Zea mays
aggggtggtaatggatcacga

SEQ ID NO: 3304 - DNA, 21 bp, Zea mays
ggacctatcctcatttttgtg

SEQ ID NO: 3305 - DNA, 21 bp, Zea mays
tccactctgcaacggtccaac

SEQ ID NO: 3306 - DNA, 21 bp, Zea mays
gttccgacccaccaatccggc

SEQ ID NO: 3307 - DNA, 21 bp, Zea mays
ttagccacgaaccaaacaggc

SEQ ID NO: 3308 - DNA, 21 bp, Zea mays
gtatggcagaaccgtgcacca

SEQ ID NO: 3309 - DNA, 21 bp, Zea mays
gtttggttcgtggctaactgt

SEQ ID NO: 3310 - DNA, 21 bp, Zea mays
gccacgaaccaaacagaccct

SEQ ID NO: 3311 - DNA, 21 bp, Zea mays
gaccctaagacaaaaccgcct

SEQ ID NO: 3312 - DNA, 21 bp, Zea mays
ggctcataccggtttcgtccg

SEQ ID NO: 3313 - DNA, 21 bp, Zea mays
gcatgtttggttcgtggctaa

SEQ ID NO: 3314 - DNA, 21 bp, Zea mays
atttcgagtgcaatccgacac

SEQ ID NO: 3315 - DNA, 21 bp, Zea mays
gccgtcgtcgtcggcggccac

SEQ ID NO: 3316 - DNA, 21 bp, Zea mays
cccattaagttcgacggtacc

SEQ ID NO: 3317 - DNA, 21 bp, Zea mays
tctatcctcctttttgtgagg

SEQ ID NO: 3318 - DNA, 21 bp, Zea mays
agaacttgagcagcataccca

SEQ ID NO: 3319 - DNA, 21 bp, Zea mays
gtccggcccaagcccgaaaag

SEQ ID NO: 3320 - DNA, 21 bp, Zea mays
gttgtttggtttctagggact

SEQ ID NO: 3321 - DNA, 21 bp, Zea mays
gatgtttggtttctagggact

SEQ ID NO: 3322 - DNA, 21 bp, Zea mays
agttaccaaactggcccttag

SEQ ID NO: 3323 - DNA, 21 bp, Zea mays
cgccactcatcacatgaccgg

SEQ ID NO: 3324 - DNA, 21 bp, Zea mays
taaggccttgttcgtttgtgt

SEQ ID NO: 3325 - DNA, 21 bp, Zea mays
gcctgtttggttcgtggctaa

SEQ ID NO: 3326 - DNA, 21 bp, Zea mays
gtggaggccaatctggcgcgg

SEQ ID NO: 3327 - DNA, 21 bp, Zea mays
tctctcccagtcggccagtcc

SEQ ID NO: 3328 - DNA, 21 bp, Zea mays
tcacatcaagcgtttgacttt

SEQ ID NO: 3329 - DNA, 21 bp, Zea mays
cccctgctaaagtttagcccg

SEQ ID NO: 3330 - DNA, 21 bp, Zea mays
ggcatcaaaccaaacaggccc

SEQ ID NO: 3331 - DNA, 21 bp, Zea mays
gtatgtgcccgtgcgttgcaa

SEQ ID NO: 3332 - DNA, 21 bp, Zea mays
cggtctgcttgctctcccgct

SEQ ID NO: 3333 - DNA, 21 bp, Zea mays
gcttgtttggttcgtggctaa

SEQ ID NO: 3334 - DNA, 21 bp, Zea mays
tatcctggtttgcagccggct

SEQ ID NO: 3335 - DNA, 21 bp, Zea mays
tcggcggccgtgtacgaggtg

SEQ ID NO: 3336 - DNA, 21 bp, Zea mays
ccttagaaaccaaacaccccc

SEQ ID NO: 3337 - DNA, 21 bp, Zea mays
ccacaaaaccggaggggattg

SEQ ID NO: 3338 - DNA, 21 bp, Zea mays
tcccctccggttttgtggctc

SEQ ID NO: 3339 - DNA, 21 bp, Zea mays
ctagcccctccaatcccctcc

SEQ ID NO: 3340 - DNA, 21 bp, Zea mays
ggcactgtttgggatagctcc

SEQ ID NO: 3341 - DNA, 21 bp, Zea mays
gggctgatttggtgattaggg

SEQ ID NO: 3342 - DNA, 21 bp, Zea mays
cgggtcaccaaatcagccctt

SEQ ID NO: 3343 - DNA, 21 bp, Zea mays
gtcccgtcctgtatccgtccc

SEQ ID NO: 3344 - DNA, 21 bp, Zea mays
cccccgacgcccttcatctcc

SEQ ID NO: 3345 - DNA, 21 bp, Zea mays
gtcatcaaaccaaacaggccc

SEQ ID NO: 3346 - DNA, 21 bp, Zea mays
tatagccacgaaccaaacagg

SEQ ID NO: 3347 - DNA, 21 bp, Zea mays
tccgacggcatcgtagacagc

SEQ ID NO: 3348 - DNA, 21 bp, Zea mays
cctggagtacctcgccgccga

SEQ ID NO: 3349 - DNA, 21 bp, Zea mays
acacctcggcgccaagatctg

SEQ ID NO: 3350 - DNA, 21 bp, Zea mays
tcggctcgtttagctcgcgag

SEQ ID NO: 3351 - DNA, 21 bp, Zea mays
gccatcaaaccaaacaggccc

SEQ ID NO: 3352 - DNA, 21 bp, Zea mays
cgaaccaaacagccccttagt

SEQ ID NO: 3353 - DNA, 21 bp, Zea mays
cccttccctcccgtcagcagt

SEQ ID NO: 3354 - DNA, 21 bp, Zea mays
gtcacgaaccaaacagaccct

SEQ ID NO: 3355 - DNA, 21 bp, Zea mays
gcatcgcacgggcactcacct

SEQ ID NO: 3356 - DNA, 21 bp, Zea mays
acagcgcacaggaccagcagc

SEQ ID NO: 3357 - DNA, 21 bp, Zea mays
aggcacaaaccaaacaggccc

SEQ ID NO: 3358 - DNA, 21 bp, Zea mays
gcaacgcacgggcactcacct

SEQ ID NO: 3359 - DNA, 21 bp, Zea mays
attctgcgatctcagccgtcc

SEQ ID NO: 3360 - DNA, 21 bp, Zea mays
tggggggggggggggggggtg

SEQ ID NO: 3361 - DNA, 21 bp, Zea mays
cggagcaccgagggatctttg

SEQ ID NO: 3362 - DNA, 21 bp, Zea mays
ggttatgggcctgtttggttc

SEQ ID NO: 3363 - DNA, 21 bp, Zea mays
gccacgaaccaaacaggccca

SEQ ID NO: 3364 - DNA, 21 bp, Zea mays
tgggcgggcacgctcgtggcc

SEQ ID NO: 3365 - DNA, 21 bp, Zea mays
ctagtcaccaaatcagccctt

SEQ ID NO: 3366 - DNA, 21 bp, Zea mays
ggcccatgcctgccttggggg

SEQ ID NO: 3367 - DNA, 21 bp, Zea mays
cgggtcggaatttgagactcg

SEQ ID NO: 3368 - DNA, 21 bp, Zea mays
cggttcctgccgccggaccac

SEQ ID NO: 3369 - DNA, 21 bp, Zea mays
actagggcttgtttggtttgt

SEQ ID NO: 3370 - DNA, 21 bp, Zea mays
gaaactccaatctggcccaag

SEQ ID NO: 3371 - DNA, 21 bp, Zea mays
ttcggcccggaggtcgttggt

SEQ ID NO: 3372 - DNA, 21 bp, Zea mays
ggctctgtttgggatagctcc

SEQ ID NO: 3373 - DNA, 21 bp, Zea mays
cccacgacctcaaccgctctg

SEQ ID NO: 3374 - DNA, 21 bp, Zea mays
ggtcactgacacgcgggactg

SEQ ID NO: 3375 - DNA, 21 bp, Zea mays
acttagcgtgctgtttggttc

SEQ ID NO: 3376 - DNA, 21 bp, Zea mays
tcggcaaagaacgcgattccg

SEQ ID NO: 3377 - DNA, 21 bp, Zea mays
ctggtcaccaaatcagccctt

SEQ ID NO: 3378 - DNA, 21 bp, Zea mays
ggcgactctccggcgacgaac

SEQ ID NO: 3379 - DNA, 21 bp, Zea mays
tgaaaatcggtgcgtccggtg

SEQ ID NO: 3380 - DNA, 21 bp, Zea mays
tgcaatccgacggaaacgaac

SEQ ID NO: 3381 - DNA, 21 bp, Zea mays
tcgcagcccctgcttcgtcgg

SEQ ID NO: 3382 - DNA, 21 bp, Zea mays
gtttttcctgtgtagagccct

SEQ ID NO: 3383 - DNA, 21 bp, Zea mays
accagcagcagcagcagttct

SEQ ID NO: 3384 - DNA, 21 bp, Zea mays
aaagccgtcggacataaggaa

SEQ ID NO: 3385 - DNA, 21 bp, Zea mays
tttatcctcctttttgtgagg

SEQ ID NO: 3386 - DNA, 21 bp, Zea mays
ggctgtttgcagcccctcaca

SEQ ID NO: 3387 - DNA, 21 bp, Zea mays
tgaggggctgcaaacagcctg

SEQ ID NO: 3388 - DNA, 21 bp, Zea mays
gtgcaatccgacgcaaacgaa

SEQ ID NO: 3389 - DNA, 21 bp, Zea mays
accaatccgacggaaacgaac

SEQ ID NO: 3390 - DNA, 21 bp, Zea mays
gcccagaaccgttccaagttt

SEQ ID NO: 3391 - DNA, 21 bp, Zea mays
tcatagaaaccaaacaccccc

SEQ ID NO: 3392 - DNA, 21 bp, Zea mays
agcagcacgtggcacgagcac

SEQ ID NO: 3393 - DNA, 21 bp, Zea mays
aaccgcaacattcgcaccctc

SEQ ID NO: 3394 - DNA, 21 bp, Zea mays
ggaggcccacaaacacagatc

SEQ ID NO: 3395 - DNA, 21 bp, Zea mays
ataccaggttgtcaagggcgt

SEQ ID NO: 3396 - DNA, 21 bp, Zea mays
gattgcacccggaatcgttcc

SEQ ID NO: 3397 - DNA, 21 bp, Zea mays
ggcgcataggacatcgtaacc

SEQ ID NO: 3398 - DNA, 21 bp, Zea mays
caaagcaccgagggatctttg

SEQ ID NO: 3399 - DNA, 21 bp, Zea mays
tgggagggagggagggagggg

SEQ ID NO: 3400 - DNA, 21 bp, Zea mays
gtcgccgtcaccgtcaccgtc

SEQ ID NO: 3401 - DNA, 21 bp, Zea mays
cccggtcaccaaatcagccct

SEQ ID NO: 3402 - DNA, 21 bp, Zea mays
tcccgtcgcaacgcacggaca

SEQ ID NO: 3403 - DNA, 21 bp, Zea mays
caatcagccagagcgggaccc

SEQ ID NO: 3404 - DNA, 21 bp, Zea mays
tcttatgtgcaagcgtgcaag

SEQ ID NO: 3405 - DNA, 21 bp, Zea mays
ggacaaccaggacagggatgt

SEQ ID NO: 3406 - DNA, 21 bp, Zea mays
cgaaagggcctgtttggttca

SEQ ID NO: 3407 - DNA, 21 bp, Zea mays
gtgagcactggaccagtcacc

SEQ ID NO: 3408 - DNA, 21 bp, Zea mays
agacctgtacgtggtgcgctg

SEQ ID NO: 3409 - DNA, 21 bp, Zea mays
ctggattggtgggtcggaacg

SEQ ID NO: 3410 - DNA, 21 bp, Zea mays
tagagaagcaatccagctcgg

SEQ ID NO: 3411 - DNA, 21 bp, Zea mays
gccggagccagcagccgctgc

SEQ ID NO: 3412 - DNA, 21 bp, Zea mays
agtatttggtttctagggact

SEQ ID NO: 3413 - DNA, 21 bp, Zea mays
tctttctgaaaaacaacctat

SEQ ID NO: 3414 - DNA, 21 bp, Zea mays
ctcggttcttcggttcggttc

SEQ ID NO: 3415 - DNA, 21 bp, Zea mays
tcctcggttcggttagttcgg

SEQ ID NO: 3416 - DNA, 21 bp, Zea mays
ggtacaaacgaacaaggcctg

SEQ ID NO: 3417 - DNA, 21 bp, Zea mays
ctagcacgcaagcactgctac

SEQ ID NO: 3418 - DNA, 21 bp, Zea mays
agacgccgccgtcggtcgtct

SEQ ID NO: 3419 - DNA, 21 bp, Zea mays
aacttagggtgcgtttggttg

SEQ ID NO: 3420 - DNA, 21 bp, Zea mays
gcgccgaggtaacacagctcg

SEQ ID NO: 3421 - DNA, 21 bp, Zea mays
ccaaagcacacaatttctggc

SEQ ID NO: 3422 - DNA, 21 bp, Zea mays
tctcgcccacgtgaacgatgc

SEQ ID NO: 3423 - DNA, 21 bp, Zea mays
ccgggtcaccaaatcagccct

SEQ ID NO: 3424 - DNA, 21 bp, Zea mays
tagccacaaaaccggagggga

SEQ ID NO: 3425 - DNA, 21 bp, Zea mays
gcgctttgccgagtgcttttt

SEQ ID NO: 3426 - DNA, 21 bp, Zea mays
cgtcccaaacccgtacccgtg

SEQ ID NO: 3427 - DNA, 21 bp, Zea mays
tcctccgctctcctctctcac

SEQ ID NO: 3428 - DNA, 21 bp, Zea mays
gggccgtggcaccttgtgagc

SEQ ID NO: 3429 - DNA, 21 bp, Zea mays
cgacctgtacgtggtgcgctg

SEQ ID NO: 3430 - DNA, 21 bp, Zea mays
gtgggagccagcagccgctgc

SEQ ID NO: 3431 - DNA, 21 bp, Zea mays
tgtctgcctgcctgcctgcct

SEQ ID NO: 3432 - DNA, 21 bp, Zea mays
tcccgcgccgcagttgtggtg

SEQ ID NO: 3433 - DNA, 21 bp, Zea mays
ctctagaaaccaaacaccccc

SEQ ID NO: 3434 - DNA, 21 bp, Zea mays
tcgagcagcccgcacgacgca

SEQ ID NO: 3435 - DNA, 21 bp, Zea mays
gacccaaacgaacaaggcctg

SEQ ID NO: 3436 - DNA, 21 bp, Zea mays
ccggttcgggtcacgtgccag

SEQ ID NO: 3437 - DNA, 21 bp, Zea mays
gcccgacttgccagaaaagtc

SEQ ID NO: 3438 - DNA, 21 bp, Zea mays
tataatccgacggaaacgaac

SEQ ID NO: 3439 - DNA, 21 bp, Zea mays
cgtccgcattccacggcctcg

SEQ ID NO: 3440 - DNA, 21 bp, Zea mays
gtggctcccaaactagccctc

SEQ ID NO: 3441 - DNA, 21 bp, Zea mays
tcttagaaaccaaacaccccc

SEQ ID NO: 3442 - DNA, 21 bp, Zea mays
tacatcatgggtccattcctc

SEQ ID NO: 3443 - DNA, 21 bp, Zea mays
agttagccacaaaccaaacat

SEQ ID NO: 3444 - DNA, 21 bp, Zea mays
tggcgcggatctctgcccctg

SEQ ID NO: 3445 - DNA, 21 bp, Zea mays
cccacaacttaagaagttgct

SEQ ID NO: 3446 - DNA, 21 bp, Zea mays
ctgatcaccaaatcagccctt

SEQ ID NO: 3447 - DNA, 21 bp, Zea mays
gaggttggtcaaggctgaagg

SEQ ID NO: 3448 - DNA, 21 bp, Zea mays
actaacttcctacggctgact

SEQ ID NO: 3449 - DNA, 21 bp, Zea mays
ccatagaaaccaaacaccccc

SEQ ID NO: 3450 - DNA, 21 bp, Zea mays
acgaccaagtccctgtcgagc

SEQ ID NO: 3451 - DNA, 21 bp, Zea mays
gtgagtgcccgtgcgttgcaa

SEQ ID NO: 3452 - DNA, 21 bp, Zea mays
agtgtttggtttctagggact

SEQ ID NO: 3453 - DNA, 21 bp, Zea mays
gtcagtgcccgtgcgttgcaa

SEQ ID NO: 3454 - DNA, 21 bp, Zea mays
ccgcccactctgcaatggccc

SEQ ID NO: 3455 - DNA, 21 bp, Zea mays
aaccgctgcgggagatgaaaa

SEQ ID NO: 3456 - DNA, 21 bp, Zea mays
atcctctagccaacatgactc

SEQ ID NO: 3457 - DNA, 21 bp, Zea mays
atgggagctagccgccaacac

SEQ ID NO: 3458 - DNA, 21 bp, Zea mays
agggtcaccaaatcagccctt

SEQ ID NO: 3459 - DNA, 21 bp, Zea mays
gttaggtccatcacggtcgtg

SEQ ID NO: 3460 - DNA, 21 bp, Zea mays
ggttgtttggttcgtggctaa

SEQ ID NO: 3461 - DNA, 21 bp, Zea mays
ctctgcccggaggtcgttggt

SEQ ID NO: 3462 - DNA, 21 bp, Zea mays
cgtcgtttggttcgtggctaa

SEQ ID NO: 3463 - DNA, 21 bp, Zea mays
ggggtttggtttctagggact

SEQ ID NO: 3464 - DNA, 21 bp, Zea mays
tgccatccgacggaaacgaac

SEQ ID NO: 3465 - DNA, 21 bp, Zea mays
cctaagggcctgttcggttgc

SEQ ID NO: 3466 - DNA, 21 bp, Zea mays
cacttagggcctgtttggttc

SEQ ID NO: 3467 - DNA, 21 bp, Zea mays
ggacccacacgcctgtctctg

SEQ ID NO: 3468 - DNA, 21 bp, Zea mays
aagggcccgttcggttgtacc

SEQ ID NO: 3469 - DNA, 21 bp, Zea mays
caaacccgtacccgcgaagaa

SEQ ID NO: 3470 - DNA, 21 bp, Zea mays
tgtgtttggtttctagggact

SEQ ID NO: 3471 - DNA, 21 bp, Zea mays
ttgatcaccaaatcagccctt

SEQ ID NO: 3472 - DNA, 21 bp, Zea mays
taggtgcccgtgcgatgccac

SEQ ID NO: 3473 - DNA, 21 bp, Zea mays
gcgctacgcagtgtgccgctt

SEQ ID NO: 3474 - DNA, 21 bp, Zea mays
cacgcgggcgggcgggcgggc

SEQ ID NO: 3475 - DNA, 21 bp, Zea mays
acatgtttggttcgtggctaa

SEQ ID NO: 3476 - DNA, 21 bp, Zea mays
ttatgtccgacggcttagcgg

SEQ ID NO: 3477 - DNA, 21 bp, Zea mays
aggattgggcctctggcctct

SEQ ID NO: 3478 - DNA, 21 bp, Zea mays
tattgtgtccgtgccagcact

SEQ ID NO: 3479 - DNA, 21 bp, Zea mays
gcacgtttggttcgtggctaa

SEQ ID NO: 3480 - DNA, 21 bp, Zea mays
tctgcgacacggcctcccacg

SEQ ID NO: 3481 - DNA, 21 bp, Zea mays
ttccgtggcatcgtacgagca

SEQ ID NO: 3482 - DNA, 21 bp, Zea mays
gaccctgtttgggatagctcc

SEQ ID NO: 3483 - DNA, 21 bp, Zea mays
gttttttgctcagctgtgccc

SEQ ID NO: 3484 - DNA, 21 bp, Zea mays
cgcgaggcagccgaagacccg

SEQ ID NO: 3485 - DNA, 21 bp, Zea mays
ttgggccttgttcgtttgtgt

SEQ ID NO: 3486 - DNA, 21 bp, Zea mays
ccgggacaccgccgccatcgc

SEQ ID NO: 3487 - DNA, 21 bp, Zea mays
gtttgatgcctaacttgccac

SEQ ID NO: 3488 - DNA, 21 bp, Zea mays
cactaacgggccggcgtcaac

SEQ ID NO: 3489 - DNA, 21 bp, Zea mays
tcgggcctgtttggtttgtgg

SEQ ID NO: 3490 - DNA, 21 bp, Zea mays
tgccgggcggcgggcaccgca

SEQ ID NO: 3491 - DNA, 21 bp, Zea mays
ccataagcactagctgagtct

SEQ ID NO: 3492 - DNA, 21 bp, Zea mays
tcccctacgcctccaacaagg

SEQ ID NO: 3493 - DNA, 21 bp, Zea mays
  unsure (1)..(2): n = A, C, G or T
nntgtttggtttctagggact

SEQ ID NO: 3494 - DNA, 21 bp, Zea mays
cctctcgcctccgtcgtcgtc

SEQ ID NO: 3495 - DNA, 21 bp, Zea mays
aagagagccgagccgagccga

SEQ ID NO: 3496 - DNA, 21 bp, Zea mays
gatctcggtgcctgttgttcc

SEQ ID NO: 3497 - DNA, 21 bp, Zea mays
caaacctgctggagatagcct

SEQ ID NO: 3498 - DNA, 21 bp, Zea mays
ccaagtctgttggattagcct

SEQ ID NO: 3499 - DNA, 21 bp, Zea mays
tggactcccaaactagccctc

SEQ ID NO: 3500 - DNA, 21 bp, Zea mays
agccgcctcgcctggagctcg

SEQ ID NO: 3501 - DNA, 21 bp, Zea mays
tttggcccagcctggcccatg

SEQ ID NO: 3502 - DNA, 21 bp, Zea mays
ctaacttgtcacactttgcct

SEQ ID NO: 3503 - DNA, 21 bp, Zea mays
ttatctccgacggcctcgtac

SEQ ID NO: 3504 - DNA, 21 bp, Zea mays
ctctttgccgagtgtcaaaaa

SEQ ID NO: 3505 - DNA, 21 bp, Zea mays
aacactcggcgaagaagctct

SEQ ID NO: 3506 - DNA, 21 bp, Zea mays
cagccgattaccaacgcagcc

SEQ ID NO: 3507 - DNA, 21 bp, Zea mays
ggttcgaatccatttggcacg

SEQ ID NO: 3508 - DNA, 21 bp, Zea mays
gtaacgcacgggcactcacct

SEQ ID NO: 3509 - DNA, 21 bp, Zea mays
gcgacgcacgggcactcacct

SEQ ID NO: 3510 - DNA, 21 bp, Zea mays
gagttgcagtagccgggacag

SEQ ID NO: 3511 - DNA, 21 bp, Zea mays
aacaacgagcattttgtccag

SEQ ID NO: 3512 - DNA, 21 bp, Zea mays
atgctcggcgccataggctat

SEQ ID NO: 3513 - DNA, 21 bp, Zea mays
tgtaccctcctcctggtggtg

SEQ ID NO: 3514 - DNA, 21 bp, Zea mays
tctgaccaatgggccccaggg

SEQ ID NO: 3515 - DNA, 21 bp, Zea mays
gaccctttgctcggcgctata

SEQ ID NO: 3516 - DNA, 21 bp, Zea mays
ggcgccaaaccctagcacgcg

SEQ ID NO: 3517 - DNA, 21 bp, Zea mays
gcagcgaaccaaacagaccct

SEQ ID NO: 3518 - DNA, 21 bp, Zea mays
tcgacaggcgaactcacccgt

SEQ ID NO: 3519 - DNA, 21 bp, Zea mays
ttaaccacgaaccaaacaggc

SEQ ID NO: 3520 - DNA, 21 bp, Zea mays
cgtgtttggtttctagggact

SEQ ID NO: 3521 - DNA, 21 bp, Zea mays
cacggcttgttcgctgcggct

SEQ ID NO: 3522 - DNA, 21 bp, Zea mays
gtccacgctgcaatgtcacac

SEQ ID NO: 3523 - DNA, 21 bp, Zea mays
aatcccgcagacagccactcc

SEQ ID NO: 3524 - DNA, 21 bp, Zea mays
acaatcacccgcagcagcaat

SEQ ID NO: 3525 - DNA, 21 bp, Zea mays
tagaagccacaaaaccggagg

SEQ ID NO: 3526 - DNA, 21 bp, Zea mays
tcaggccttgttcgtttgtgt

SEQ ID NO: 3527 - DNA, 21 bp, Zea mays
tggttgctcctgctaaagttt

SEQ ID NO: 3528 - DNA, 21 bp, Zea mays
atttagccacaaaccaaacat

SEQ ID NO: 3529 - DNA, 21 bp, Zea mays
catcgggcttcacgcgtgctc

SEQ ID NO: 3530 - DNA, 21 bp, Zea mays
tggtggctcgactcggctcgt

SEQ ID NO: 3531 - DNA, 21 bp, Zea mays
catgacatcctccgatccggc

SEQ ID NO: 3532 - DNA, 21 bp, Zea mays
cctagtcaccaaatcagccct

SEQ ID NO: 3533 - DNA, 21 bp, Zea mays
tggctgtctcgcaaccaaaca

SEQ ID NO: 3534 - DNA, 21 bp, Zea mays
gtcccgtcctgtcattgcaac

SEQ ID NO: 3535 - DNA, 21 bp, Zea mays
ggcccggcacgacacatagtg

SEQ ID NO: 3536 - DNA, 21 bp, Zea mays
ggccaggctcaccagatacga

SEQ ID NO: 3537 - DNA, 21 bp, Zea mays
gagcctggctctggagatgcg

SEQ ID NO: 3538 - DNA, 21 bp, Zea mays
accctctagccaacatgactc

SEQ ID NO: 3539 - DNA, 21 bp, Zea mays
tagccgccggtgtagccgccg

SEQ ID NO: 3540 - DNA, 21 bp, Zea mays
taccagccgcagccgcagccg

SEQ ID NO: 3541 - DNA, 21 bp, Zea mays
cctagggcttgtttggtttgt

SEQ ID NO: 3542 - DNA, 21 bp, Zea mays
aggcgccacagatcttggtgc

SEQ ID NO: 3543 - DNA, 21 bp, Zea mays
agggctcgtttgtttctgctg

SEQ ID NO: 3544 - DNA, 21 bp, Zea mays
acgctgcctgcctgcctgcct

SEQ ID NO: 3545 - DNA, 21 bp, Zea mays
ggcaaccgctgaagacagtct

SEQ ID NO: 3546 - DNA, 21 bp, Zea mays
aacgtatcttgtgcgcaagga

SEQ ID NO: 3547 - DNA, 21 bp, Zea mays
aattagccacaaaccaaacat

SEQ ID NO: 3548 - DNA, 21 bp, Zea mays
agcccgggtcacatcaagcgt

SEQ ID NO: 3549 - DNA, 21 bp, Zea mays
cttgccagccacacgatcttc

SEQ ID NO: 3550 - DNA, 21 bp, Zea mays
tatcccaaacccgtacccgtg

SEQ ID NO: 3551 - DNA, 21 bp, Zea mays
aggcccaacaccagtcagccc

SEQ ID NO: 3552 - DNA, 21 bp, Zea mays
cggctgccctgcgtatgtcgc

SEQ ID NO: 3553 - DNA, 21 bp, Zea mays
cacacacgcccaatgctacgc

SEQ ID NO: 3554 - DNA, 21 bp, Zea mays
ctcggcgccacagcctatggc

SEQ ID NO: 3555 - DNA, 21 bp, Zea mays
tgggcctggctcccgagatac

SEQ ID NO: 3556 - DNA, 21 bp, Zea mays
tacaatccgacggaaacgaac

SEQ ID NO: 3557 - DNA, 21 bp, Zea mays
ccctgttacgtccacggttac

SEQ ID NO: 3558 - DNA, 21 bp, Zea mays
gtcctcctctacgtcacctct

SEQ ID NO: 3559 - DNA, 21 bp, Zea mays
ccttatgtgcaagcgtgcaag

SEQ ID NO: 3560 - DNA, 21 bp, Zea mays
acctagaaaccaaacaccccc

SEQ ID NO: 3561 - DNA, 21 bp, Zea mays
atatatgggcctgtttggttc

SEQ ID NO: 3562 - DNA, 21 bp, Zea mays
attaaagccgcagcaagccgc

SEQ ID NO: 3563 - DNA, 21 bp, Zea mays
gacgtttacatggcctgctgg

SEQ ID NO: 3564 - DNA, 21 bp, Zea mays
gactgtttggttcgtggctaa

SEQ ID NO: 3565 - DNA, 21 bp, Zea mays
tagtgccttgttcgtttgtgt

SEQ ID NO: 3566 - DNA, 21 bp, Zea mays
gccaggggacaccgctgcggc

SEQ ID NO: 3567 - DNA, 21 bp, Zea mays
gtcgtttggtttctagggact

SEQ ID NO: 3568 - DNA, 21 bp, Zea mays
ctgttcggttgctcaggaacg

SEQ ID NO: 3569 - DNA, 21 bp, Zea mays
agctcgctccaaacacgatct

SEQ ID NO: 3570 - DNA, 21 bp, Zea mays
  unsure (1): n = A, C, G or T
ncggcgccatagcctatggcg

SEQ ID NO: 3571 - DNA, 21 bp, Zea mays
cccccgactcatcctactttg

SEQ ID NO: 3572 - DNA, 21 bp, Zea mays
cactagcgtgctgtttggttc

SEQ ID NO: 3573 - DNA, 21 bp, Zea mays
cccattagggcttgttcggtt

SEQ ID NO: 3574 - DNA, 21 bp, Zea mays
ggccatgttcggttacaccaa

SEQ ID NO: 3575 - DNA, 21 bp, Zea mays
gccacgagtcgagcgagctca

SEQ ID NO: 3576 - DNA, 21 bp, Zea mays
tgactgtctcgcaaccaaaca

SEQ ID NO: 3577 - DNA, 21 bp, Zea mays
ggagcaagcctatcgtgcttc

SEQ ID NO: 3578 - DNA, 21 bp, Zea mays
tcctctccggttttgtggctc

SEQ ID NO: 3579 - DNA, 21 bp, Zea mays
ccgagttcgatccccctcggg

SEQ ID NO: 3580 - DNA, 21 bp, Zea mays
tcccgttgcaacgcacgggca

SEQ ID NO: 3581 - DNA, 21 bp, Zea mays
ggtatttggtttctagggact

SEQ ID NO: 3582 - DNA, 21 bp, Zea mays
aagcactcggcaaagcctaga

SEQ ID NO: 3583 - DNA, 21 bp, Zea mays
taggaaccaagcctgcggcag

SEQ ID NO: 3584 - DNA, 21 bp, Zea mays
cgccgagcaacccagcgaggc

SEQ ID NO: 3585 - DNA, 21 bp, Zea mays
ataacgggagccctgggcttc

SEQ ID NO: 3586 - DNA, 21 bp, Zea mays
tcctggagcgctccggcggca

SEQ ID NO: 3587 - DNA, 21 bp, Zea mays
gtcacatcaagtgtttgactt

SEQ ID NO: 3588 - DNA, 21 bp, Zea mays
attgctcccaaactagccctc

SEQ ID NO: 3589 - DNA, 21 bp, Zea mays
aacgattcctgaccggattgc

SEQ ID NO: 3590 - DNA, 21 bp, Zea mays
aaccttaagttcgacggtacc

SEQ ID NO: 3591 - DNA, 21 bp, Zea mays
ctaacccctccaatcccctcc

SEQ ID NO: 3592 - DNA, 21 bp, Zea mays
cccccttcgtagcggaccgct

SEQ ID NO: 3593 - DNA, 21 bp, Zea mays
caaggcgctcaacactaccgt

SEQ ID NO: 3594 - DNA, 21 bp, Zea mays
gcagttagtccacctcgccgt

SEQ ID NO: 3595 - DNA, 21 bp, Zea mays
gggcatgttcggttacaccaa

SEQ ID NO: 3596 - DNA, 21 bp, Zea mays
ggacttgttcggttacaccaa

SEQ ID NO: 3597 - DNA, 21 bp, Zea mays
tcccctaccactccgtctatg

SEQ ID NO: 3598 - DNA, 21 bp, Zea mays
ttgaagcggcccacccgactg

SEQ ID NO: 3599 - DNA, 21 bp, Zea mays
gctaacttcctacggctgact

SEQ ID NO: 3600 - DNA, 21 bp, Zea mays
gctagccgagtcgtcgcccca

SEQ ID NO: 3601 - DNA, 21 bp, Zea mays
ttaagccttgttcgtttgtgt

SEQ ID NO: 3602 - DNA, 21 bp, Zea mays
tttgacactcggcaaagcccc

SEQ ID NO: 3603 - DNA, 21 bp, Zea mays
ccaggcacggcccgtgagcct

SEQ ID NO: 3604 - DNA, 21 bp, Zea mays
aagcctgctggactgatgaat

SEQ ID NO: 3605 - DNA, 21 bp, Zea mays
agcgaaccaaacaccaaaagt

SEQ ID NO: 3606 - DNA, 21 bp, Zea mays
atggctcccaaactagccctc

SEQ ID NO: 3607 - DNA, 21 bp, Zea mays
ttttttgccgagtgtcaaaaa

SEQ ID NO: 3608 - DNA, 21 bp, Zea mays
ggccgtttggttcgtggctaa

SEQ ID NO: 3609 - DNA, 21 bp, Zea mays
ccgcctggaaggaatcccgac

SEQ ID NO: 3610 - DNA, 21 bp, Zea mays
ggctagtttggcagcaacgtg

SEQ ID NO: 3611 - DNA, 21 bp, Zea mays
gtttagaggacgttgctggag

SEQ ID NO: 3612 - DNA, 21 bp, Zea mays
gggcccccacaaacatgcaag

SEQ ID NO: 3613 - DNA, 21 bp, Zea mays
cataacgacgatggcggcggc

SEQ ID NO: 3614 - DNA, 21 bp, Zea mays
tatgtccgacggctttggccg

SEQ ID NO: 3615 - DNA, 21 bp, Zea mays
cgtcgagcaacccagcgaggc

SEQ ID NO: 3616 - DNA, 21 bp, Zea mays
ggcttattcccgtcggttttc

SEQ ID NO: 3617 - DNA, 21 bp, Zea mays
tttggtttcctgtaccgactc

SEQ ID NO: 3618 - DNA, 21 bp, Zea mays
ctctttgccgagtgtcacact

SEQ ID NO: 3619 - DNA, 21 bp, Zea mays
cggatcaccaaatcagccctt

SEQ ID NO: 3620 - DNA, 21 bp, Zea mays
ataagctgtgccaaacagagc

SEQ ID NO: 3621 - DNA, 21 bp, Zea mays
catatccgtcacccgatggac

SEQ ID NO: 3622 - DNA, 21 bp, Zea mays
tgaggggctgcaaacagtctg

SEQ ID NO: 3623 - DNA, 21 bp, Zea mays
gactgtttgcagcccctcaca

SEQ ID NO: 3624 - DNA, 21 bp, Zea mays
cctgggccgacggtttctgca

SEQ ID NO: 3625 - DNA, 21 bp, Zea mays
gtgaagccgcgcgacgagaat

SEQ ID NO: 3626 - DNA, 21 bp, Zea mays
ttctctccggttttgtggctc

SEQ ID NO: 3627 - DNA, 21 bp, Zea mays
cgactcaggcccaagcacggc

SEQ ID NO: 3628 - DNA, 21 bp, Zea mays
caccagcctgccgctgagaga

SEQ ID NO: 3629 - DNA, 21 bp, Zea mays
cctgtcgtctcgctggacacg

SEQ ID NO: 3630 - DNA, 21 bp, Zea mays
tgctggcccaagcacggcacg

SEQ ID NO: 3631 - DNA, 21 bp, Zea mays
gcttctgctagtccttgcacg

SEQ ID NO: 3632 - DNA, 21 bp, Zea mays
agcttctttgccgagtgcccg

SEQ ID NO: 3633 - DNA, 21 bp, Zea mays
gacgccctctccgagtctcgg

SEQ ID NO: 3634 - DNA, 21 bp, Zea mays
agtgggccttctctaggcgca

SEQ ID NO: 3635 - DNA, 21 bp, Zea mays
gtgctggcccaggcacggcac

SEQ ID NO: 3636 - DNA, 21 bp, Zea mays
ctgcgtgccgtgcctgggcca

SEQ ID NO: 3637 - DNA, 21 bp, Zea mays
ctttagaaaccaaacaccccc

SEQ ID NO: 3638 - DNA, 21 bp, Zea mays
ggcgtttggtttctagggact

SEQ ID NO: 3639 - DNA, 21 bp, Zea mays
tgcaatagctgtcatgcgccc

SEQ ID NO: 3640 - DNA, 21 bp, Zea mays
tgccctgttggaaggtgtttt

SEQ ID NO: 3641 - DNA, 21 bp, Zea mays
caatcgtggctgggccgctgg

SEQ ID NO: 3642 - DNA, 21 bp, Zea mays
tggtggcgatgggcgcaccgg

SEQ ID NO: 3643 - DNA, 21 bp, Zea mays
tatgtacgcagtgcagtccct

SEQ ID NO: 3644 - DNA, 21 bp, Zea mays
atccgatccgagccgagccga

SEQ ID NO: 3645 - DNA, 21 bp, Zea mays
tgactgatttggtgattaggg

SEQ ID NO: 3646 - DNA, 21 bp, Zea mays
tcgagaacccgaatagaccga

SEQ ID NO: 3647 - DNA, 21 bp, Zea mays
cctggtcaccaaatcagccct

SEQ ID NO: 3648 - DNA, 21 bp, Zea mays
tcactgcctgcctgcctgcct

SEQ ID NO: 3649 - DNA, 21 bp, Zea mays
tttaagggagggagggaggga

SEQ ID NO: 3650 - DNA, 21 bp, Zea mays
gcgcagtagctggctgcgcgg

SEQ ID NO: 3651 - DNA, 21 bp, Zea mays
tcgcggtcgttctcacatggg

SEQ ID NO: 3652 - DNA, 21 bp, Zea mays
gttggcttgctcggtttatgg

SEQ ID NO: 3653 - DNA, 21 bp, Zea mays
tatgtttggtttctagggact

SEQ ID NO: 3654 - DNA, 21 bp, Zea mays
ttccgttgcaacgcacgggca

SEQ ID NO: 3655 - DNA, 21 bp, Zea mays
atccacatacacggcgttgct

SEQ ID NO: 3656 - DNA, 21 bp, Zea mays
gctaagagcaactccaatagt

SEQ ID NO: 3657 - DNA, 21 bp, Zea mays
atggtcaccaaatcagccctt

SEQ ID NO: 3658 - DNA, 21 bp, Zea mays
tctggtcaccaaatcagccct

SEQ ID NO: 3659 - DNA, 21 bp, Zea mays
gtctgtttggttcgtggctaa

SEQ ID NO: 3660 - DNA, 21 bp, Zea mays
tgcaggcagaaccgtgcacca

SEQ ID NO: 3661 - DNA, 21 bp, Zea mays
ttggctcgtttagctcgcgag

SEQ ID NO: 3662 - DNA, 21 bp, Zea mays
agcgggtcgtgtttgggcctc

SEQ ID NO: 3663 - DNA, 21 bp, Zea mays
cgaggcagtctggttggcacg

SEQ ID NO: 3664 - DNA, 21 bp, Zea mays
gcgggagccagcagccgctgc

SEQ ID NO: 3665 - DNA, 21 bp, Zea mays
gtctcggccgagaaaatcccc

SEQ ID NO: 3666 - DNA, 21 bp, Zea mays
tcctttcgcaggggtcttcag

SEQ ID NO: 3667 - DNA, 21 bp, Zea mays
ctaaacccgcacctgaacccg

SEQ ID NO: 3668 - DNA, 21 bp, Zea mays
gtgacaagtgcgcctgcgtgc

SEQ ID NO: 3669 - DNA, 21 bp, Zea mays
tacttagggtgcgtttggttg

SEQ ID NO: 3670 - DNA, 21 bp, Zea mays
tgttagccacaaaccaaacat

SEQ ID NO: 3671 - DNA, 21 bp, Zea mays
atcttctttgccgagtgcctg

SEQ ID NO: 3672 - DNA, 21 bp, Zea mays
tccacatccaatggtgctgcg

SEQ ID NO: 3673 - DNA, 21 bp, Zea mays
gaataagacgagccagtcaag

SEQ ID NO: 3674 - DNA, 21 bp, Zea mays
tgagcacaccagcaaaaccga

SEQ ID NO: 3675 - DNA, 21 bp, Zea mays
tgcatgcaccggggcttgcct

SEQ ID NO: 3676 - DNA, 21 bp, Zea mays
ccgtctctgtgctgtccggtg

SEQ ID NO: 3677 - DNA, 21 bp, Zea mays
ctaatcaccaaatcagccctt

SEQ ID NO: 3678 - DNA, 21 bp, Zea mays
tctcccgcagcggttccccct

SEQ ID NO: 3679 - DNA, 21 bp, Zea mays
cacgccctaaggccctgttcg

SEQ ID NO: 3680 - DNA, 21 bp, Zea mays
taccagtggcttcggcaatac

SEQ ID NO: 3681 - DNA, 21 bp, Zea mays
gcacagtacgctttgtcgagt

SEQ ID NO: 3682 - DNA, 21 bp, Zea mays
ataacttgtcacactttgcct

SEQ ID NO: 3683 - DNA, 21 bp, Zea mays
cacgggcacggcacgattagc

SEQ ID NO: 3684 - DNA, 21 bp, Zea mays
gtcttccccaacccagcgggc

SEQ ID NO: 3685 - DNA, 21 bp, Zea mays
aggagaccgtcggacataagc

SEQ ID NO: 3686 - DNA, 21 bp, Zea mays
tccgtcgcaacgcacgggcac

SEQ ID NO: 3687 - DNA, 21 bp, Zea mays
tgagtgtccgtgcgttgcaac

SEQ ID NO: 3688 - DNA, 21 bp, Zea mays
tgcgagtgtcttcccagccct

SEQ ID NO: 3689 - DNA, 21 bp, Zea mays
gtgtgacgaccgttgaaactg

SEQ ID NO: 3690 - DNA, 21 bp, Zea mays
cgcgaagccgccgccgccgct

SEQ ID NO: 3691 - DNA, 21 bp, Zea mays
ctgtcctggctgtcccgcaac

SEQ ID NO: 3692 - DNA, 21 bp, Zea mays
gctgtttggtttctagggact

SEQ ID NO: 3693 - DNA, 21 bp, Zea mays
tgacacaaaccaaacaggccc

SEQ ID NO: 3694 - DNA, 21 bp, Zea mays
attgcaaccggaatcgttcca

SEQ ID NO: 3695 - DNA, 21 bp, Zea mays
gacgcacacggaccacgcgac

SEQ ID NO: 3696 - DNA, 21 bp, Zea mays
gtgcagcccggatgcaaacca

SEQ ID NO: 3697 - DNA, 21 bp, Zea mays
aatagacggtgtcgcaacacc

SEQ ID NO: 3698 - DNA, 21 bp, Zea mays
gctctgcctgcctgcctgcct

SEQ ID NO: 3699 - DNA, 21 bp, Zea mays
gataaatgggtcggcacgacg

SEQ ID NO: 3700 - DNA, 21 bp, Zea mays
gagcctcccaaactagccctc

SEQ ID NO: 3701 - DNA, 21 bp, Zea mays
gaaagcagcggagaactcacg

SEQ ID NO: 3702 - DNA, 21 bp, Zea mays
atatagaggacgttgctggag

SEQ ID NO: 3703 - DNA, 21 bp, Zea mays
aataagacgtctgttgctact

SEQ ID NO: 3704 - DNA, 21 bp, Zea mays
aagccaagtcgaccccaagcg

SEQ ID NO: 3705 - DNA, 21 bp, Zea mays
agtccgggtcacatcaagcgt

SEQ ID NO: 3706 - DNA, 21 bp, Zea mays
tcagcgaaccaaacagaccct

SEQ ID NO: 3707 - DNA, 21 bp, Zea mays
gcaccttaggcagcaaaccag

SEQ ID NO: 3708 - DNA, 21 bp, Zea mays
aggcgcaacattcgcaccctc

SEQ ID NO: 3709 - DNA, 21 bp, Zea mays
atatagggcctgtttggttca

SEQ ID NO: 3710 - DNA, 21 bp, Zea mays
cacaactctggctcaggcacg

SEQ ID NO: 3711 - DNA, 21 bp, Zea mays
tctccaaggtgaacagcctct

SEQ ID NO: 3712 - DNA, 21 bp, Zea mays
ccccgttgcaacgcacgggca

SEQ ID NO: 3713 - DNA, 21 bp, Zea mays
cccaaacccgcccgcgaccac

SEQ ID NO: 3714 - DNA, 21 bp, Zea mays
agccgcaacattcgcaccctc

SEQ ID NO: 3715 - DNA, 21 bp, Zea mays
atatgtttggttccataggac

SEQ ID NO: 3716 - DNA, 21 bp, Zea mays
catagatcttggcgccgagct

SEQ ID NO: 3717 - DNA, 21 bp, Zea mays
cacagccggattgcagccgca

SEQ ID NO: 3718 - DNA, 21 bp, Zea mays
taggtgagtgtccgtacgttg

SEQ ID NO: 3719 - DNA, 21 bp, Zea mays
gtttgattgcatgcttgcacc

SEQ ID NO: 3720 - DNA, 21 bp, Zea mays
caggtcggtcggtcggtcggt

SEQ ID NO: 3721 - DNA, 21 bp, Zea mays
cctggctgcttctgtggactg

SEQ ID NO: 3722 - DNA, 21 bp, Zea mays
ccaagtcaatcgccgccgagt

SEQ ID NO: 3723 - DNA, 21 bp, Zea mays
tatatgcccgtgcgttgctac

SEQ ID NO: 3724 - DNA, 21 bp, Zea mays
agttttgccgagtgtcaaaaa

SEQ ID NO: 3725 - DNA, 21 bp, Zea mays
tgtggcgcggtgtggcgtctg

SEQ ID NO: 3726 - DNA, 21 bp, Zea mays
cagctcagctcggctcggctc

SEQ ID NO: 3727 - DNA, 21 bp, Zea mays
ccggtcgatccgtgcgaagac

SEQ ID NO: 3728 - DNA, 21 bp, Zea mays
cacggtgctggacgccttggg

SEQ ID NO: 3729 - DNA, 21 bp, Zea mays
gaaccgctgtagagcgtggag

SEQ ID NO: 3730 - DNA, 21 bp, Zea mays
actcacgtgccacgtcagcgt

SEQ ID NO: 3731 - DNA, 21 bp, Zea mays
gattcctggtcaccaaatcag

SEQ ID NO: 3732 - DNA, 21 bp, Zea mays
accggcgggcagcgggagcca

SEQ ID NO: 3733 - DNA, 21 bp, Zea mays
gattgattgcatgcttgcacc

SEQ ID NO: 3734 - DNA, 21 bp, Zea mays
aactagaaaccaaacaccccc

SEQ ID NO: 3735 - DNA, 21 bp, Zea mays
catagggcttgtttggtttgt

SEQ ID NO: 3736 - DNA, 21 bp, Zea mays
ttagaggggctaaaatcacct

SEQ ID NO: 3737 - DNA, 21 bp, Zea mays
cgagaaaaccggaggggattg

SEQ ID NO: 3738 - DNA, 21 bp, Zea mays
tttgtcaccaaatcagccctt

SEQ ID NO: 3739 - DNA, 21 bp, Zea mays
tgaggccttgttcgtttgtgt

SEQ ID NO: 3740 - DNA, 21 bp, Zea mays
acaggaccgtcggacataagc

SEQ ID NO: 3741 - DNA, 21 bp, Zea mays
ccccttacctccgacggcctc

SEQ ID NO: 3742 - DNA, 21 bp, Zea mays
gccgagcagcaggcatccaat

SEQ ID NO: 3743 - DNA, 21 bp, Zea mays
tgctcgtcttcctgcctccac

SEQ ID NO: 3744 - DNA, 21 bp, Zea mays
cgccaatcggcccccaagaac

SEQ ID NO: 3745 - DNA, 21 bp, Zea mays
aatcgcgggctgggccgtgct

SEQ ID NO: 3746 - DNA, 21 bp, Zea mays
agccgtgtcgggccgtgcttt

SEQ ID NO: 3747 - DNA, 21 bp, Zea mays
ctataggcagaaccgtgcacc

SEQ ID NO: 3748 - DNA, 21 bp, Zea mays
tacgtcctcgtgccggagcaa

SEQ ID NO: 3749 - DNA, 21 bp, Zea mays
caacccgagagcggatggggt

SEQ ID NO: 3750 - DNA, 21 bp, Zea mays
gactatgggcctgtttggttc

SEQ ID NO: 3751 - DNA, 21 bp, Zea mays
ggcacgaaccaaacaggccca

SEQ ID NO: 3752 - DNA, 21 bp, Zea mays
ggcctcgtctcctccggatcg

SEQ ID NO: 3753 - DNA, 21 bp, Zea mays
gcctcgggcgggcgggcgggc

SEQ ID NO: 3754 - DNA, 21 bp, Zea mays
cggcagcatcccccttgcaaa

SEQ ID NO: 3755 - DNA, 21 bp, Zea mays
gactgcacccggaatcgttcc

SEQ ID NO: 3756 - DNA, 21 bp, Zea mays
tcttggtgctgttgggatttg

SEQ ID NO: 3757 - DNA, 21 bp, Zea mays
caaagcgagccgagccgagct

SEQ ID NO: 3758 - DNA, 21 bp, Zea mays
ccggagccagccagccagcca

SEQ ID NO: 3759 - DNA, 21 bp, Zea mays
ggtcctgtttgggatagctcc

SEQ ID NO: 3760 - DNA, 21 bp, Zea mays
tcagggcttaaccgaacgcac

SEQ ID NO: 3761 - DNA, 21 bp, Zea mays
gccctggcactcggcaaagag

SEQ ID NO: 3762 - DNA, 21 bp, Zea mays
ctccgttgcaacgcacgggca

SEQ ID NO: 3763 - DNA, 21 bp, Zea mays
gcttgagtacctcgccgccga

SEQ ID NO: 3764 - DNA, 21 bp, Zea mays
tcggtgcacgagcatcgcagc

SEQ ID NO: 3765 - DNA, 21 bp, Zea mays
gttagtgcccgtgcgttgcaa

SEQ ID NO: 3766 - DNA, 21 bp, Zea mays
agccaccgttccttagctccg

SEQ ID NO: 3767 - DNA, 21 bp, Zea mays
gtatagtgccggcacggcacg

SEQ ID NO: 3768 - DNA, 21 bp, Zea mays
ctctgtttgcagcccctcaca

SEQ ID NO: 3769 - DNA, 21 bp, Zea mays
ccgtcctgtcattgcaaccaa

SEQ ID NO: 3770 - DNA, 21 bp, Zea mays
tcgatgtggccgcttcacccg

SEQ ID NO: 3771 - DNA, 21 bp, Zea mays
aagggggggggggggggggtg

SEQ ID NO: 3772 - DNA, 21 bp, Zea mays
agtggagcaaccgtactggac

SEQ ID NO: 3773 - DNA, 21 bp, Zea mays
aacattaagttcgacggtacc

SEQ ID NO: 3774 - DNA, 21 bp, Zea mays
gatgcttctttgccgagtgcc

SEQ ID NO: 3775 - DNA, 21 bp, Zea mays
aaattctttgccgagtgctgt

SEQ ID NO: 3776 - DNA, 21 bp, Zea mays
ggccctgtttgggatagctcc

SEQ ID NO: 3777 - DNA, 21 bp, Zea mays
tcgtcctgtcattgcaaccaa

SEQ ID NO: 3778 - DNA, 21 bp, Zea mays
cagtgtttggttcgtggctaa

SEQ ID NO: 3779 - DNA, 21 bp, Zea mays
gcctattttcggcggttcctg

SEQ ID NO: 3780 - DNA, 21 bp, Zea mays
agacttagcctccaagcgacc

SEQ ID NO: 3781 - DNA, 21 bp, Zea mays
ctttagggcctgtttggttca

SEQ ID NO: 3782 - DNA, 21 bp, Zea mays
tctggccttgttcgtttgtgt

SEQ ID NO: 3783 - DNA, 21 bp, Zea mays
cagagtctgttggattagcct

SEQ ID NO: 3784 - DNA, 21 bp, Zea mays
tgggggtgggtgggtgggtgg

SEQ ID NO: 3785 - DNA, 21 bp, Zea mays
cgaaatttggctctttgccga

SEQ ID NO: 3786 - DNA, 21 bp, Zea mays
agcgtgcctgcctgcctgcct

SEQ ID NO: 3787 - DNA, 21 bp, Zea mays
ccagcccctccaatcccctcc

SEQ ID NO: 3788 - DNA, 21 bp, Zea mays
ggcacaaacgaacaaggcctg

SEQ ID NO: 3789 - DNA, 21 bp, Zea mays
catggtcaccaaatcagccct

SEQ ID NO: 3790 - DNA, 21 bp, Zea mays
agacgtacgtgtggatgcagc

SEQ ID NO: 3791 - DNA, 21 bp, Zea mays
gcacggcccaagcacggcacg

SEQ ID NO: 3792 - DNA, 21 bp, Zea mays
attagccacgaaccaaacagg

SEQ ID NO: 3793 - DNA, 21 bp, Zea mays
gggaaccgctgaagacagtct

SEQ ID NO: 3794 - DNA, 21 bp, Zea mays
cgtgggagagggcactgccgc

SEQ ID NO: 3795 - DNA, 21 bp, Zea mays
tatgggtggggcaggggttcg

SEQ ID NO: 3796 - DNA, 21 bp, Zea mays
tcgtggtcgttctcacatggg

SEQ ID NO: 3797 - DNA, 21 bp, Zea mays
ttttacatcacaggcggttcg

SEQ ID NO: 3798 - DNA, 21 bp, Zea mays
ctaaccgaaccgcctgtgatg

SEQ ID NO: 3799 - DNA, 21 bp, Zea mays
gcgcctcctcggtcaccgcct

SEQ ID NO: 3800 - DNA, 21 bp, Zea mays
gtgacgcacgggcactcacct

SEQ ID NO: 3801 - DNA, 21 bp, Zea mays
gtgtcgggccagcctgttagc

SEQ ID NO: 3802 - DNA, 21 bp, Zea mays
tgtaggctcggcccgtaggcc

SEQ ID NO: 3803 - DNA, 21 bp, Zea mays
gtgtcgtcgcaacgcacgggc

SEQ ID NO: 3804 - DNA, 21 bp, Zea mays
ggccacgcagccagccagcct

SEQ ID NO: 3805 - DNA, 21 bp, Zea mays
cttctttgccgagtgcttttt

SEQ ID NO: 3806 - DNA, 21 bp, Zea mays
tcttgtcaccaaatcagccct

SEQ ID NO: 3807 - DNA, 21 bp, Zea mays
gacgccgtcgtcgttgtctgc

SEQ ID NO: 3808 - DNA, 21 bp, Zea mays
tagtcgtgctcaggctgggtt

SEQ ID NO: 3809 - DNA, 21 bp, Zea mays
acacatatctgatcggatctt

SEQ ID NO: 3810 - DNA, 21 bp, Zea mays
ctatactaccactgtcttttt

SEQ ID NO: 3811 - DNA, 21 bp, Zea mays
aaaaaagagttgcaaaactag

SEQ ID NO: 3812 - DNA, 21 bp, Zea mays
aaaccacttcaatactagagt

SEQ ID NO: 3813 - DNA, 21 bp, Zea mays
tttataattagtttgaccttt

SEQ ID NO: 3814 - DNA, 21 bp, Zea mays
taaatcctgcgcgaagtccac

SEQ ID NO: 3815 - DNA, 21 bp, Zea mays
aaattagtcgaaaccagatcc

SEQ ID NO: 3816 - DNA, 21 bp, Zea mays
tgagctggaatgaatcctgac

SEQ ID NO: 3817 - DNA, 21 bp, Zea mays
tgatagtcacacatcacaggt

SEQ ID NO: 3818 - DNA, 21 bp, Zea mays
aatccggttaggaatcgttcc

SEQ ID NO: 3819 - DNA, 21 bp, Zea mays
cgggcgcaaccagccgacaac

SEQ ID NO: 3820 - DNA, 21 bp, Zea mays
ctagagggcatgagccaaaaa

SEQ ID NO: 3821 - DNA, 21 bp, Zea mays
gatagatcaaaatatggagtg

SEQ ID NO: 3822 - DNA, 21 bp, Zea mays
gtgtcgaagtcagtgctggac

SEQ ID NO: 3823 - DNA, 21 bp, Zea mays
caaatcctgcgcgaagtccac

SEQ ID NO: 3824 - DNA, 21 bp, Zea mays
cagatcctgcgcgaagtccac

SEQ ID NO: 3825 - DNA, 21 bp, Zea mays
ctctatatatagtgcaaagtt

SEQ ID NO: 3826 - DNA, 21 bp, Zea mays
cagccaaggatgacttgccga

SEQ ID NO: 3827 - DNA, 21 bp, Zea mays
ttcgacgccatagcctatagc

SEQ ID NO: 3828 - DNA, 21 bp, Zea mays
tgcactagaactagtagttag

SEQ ID NO: 3829 - DNA, 21 bp, Zea mays
tatagatcaaaatatggagtg

SEQ ID NO: 3830 - DNA, 21 bp, Zea mays
ttgagccgcgtcaatatctcc

SEQ ID NO: 3831 - DNA, 21 bp, Zea mays
ggagatattgacgcggctcaa

SEQ ID NO: 3832 - DNA, 21 bp, Zea mays
ttttgtgcctaaggttagttc

SEQ ID NO: 3833 - DNA, 21 bp, Zea mays
ggacaaatcagcgacataaac

SEQ ID NO: 3834 - DNA, 21 bp, Zea mays
tctaccctccaaatgtagcgg

SEQ ID NO: 3835 - DNA, 21 bp, Zea mays
ccaatcctgcgcgaagtccac

SEQ ID NO: 3836 - DNA, 21 bp, Zea mays
gcagtagaggcgcaagaagat

SEQ ID NO: 3837 - DNA, 21 bp, Zea mays
ccaagggattgatgtgatctt

SEQ ID NO: 3838 - DNA, 21 bp, Zea mays
cagccggactaagcacaacaa

SEQ ID NO: 3839 - DNA, 21 bp, Zea mays
gcaccacgcgcaggcttagct

SEQ ID NO: 3840 - DNA, 21 bp, Zea mays
ccaagcgcgatgaccaattgt

SEQ ID NO: 3841 - DNA, 21 bp, Zea mays
cagtccgagaagggcaagaga

SEQ ID NO: 3842 - DNA, 21 bp, Zea mays
tcagaggcccaaccctatatc

SEQ ID NO: 3843 - DNA, 21 bp, Zea mays
gtcggacataatgctatttcc

SEQ ID NO: 3844 - DNA, 21 bp, Zea mays
ggctatggtataggcgtccac

SEQ ID NO: 3845 - DNA, 21 bp, Zea mays
ccagaggcccaaccctatatc

SEQ ID NO: 3846 - DNA, 21 bp, Zea mays
cctctaaatttagaggaccgt

SEQ ID NO: 3847 - DNA, 21 bp, Zea mays
ccacctcacgcacgaatgcgg

SEQ ID NO: 3848 - DNA, 21 bp, Zea mays
caaatagatagagaaccgttt

SEQ ID NO: 3849 - DNA, 21 bp, Zea mays
ccgcgaacacggcaaggattc

SEQ ID NO: 3850 - DNA, 21 bp, Zea mays
cacatcaagcgtttgactttt

SEQ ID NO: 3851 - DNA, 21 bp, Zea mays
catctgggcgagcgacatgcc

SEQ ID NO: 3852 - DNA, 21 bp, Zea mays
gatctgggcgagcgacatgcc

SEQ ID NO: 3853 - DNA, 21 bp, Zea mays
aatctgggcgagcgacatgcc

SEQ ID NO: 3854 - DNA, 21 bp, Zea mays
ttatttcgtgccgggctcgtg

SEQ ID NO: 3855 - DNA, 21 bp, Zea mays
gcctatggcgccgagcatcgg

SEQ ID NO: 3856 - DNA, 21 bp, Zea mays
gcccctgaggcgtgacttagg

SEQ ID NO: 3857 - DNA, 21 bp, Zea mays
gtctacatagtgtaggaacat

SEQ ID NO: 3858 - DNA, 21 bp, Zea mays
gcgaccttggctatcaactac

SEQ ID NO: 3859 - DNA, 21 bp, Zea mays
tatactttgccgagtgccttt

SEQ ID NO: 3860 - DNA, 21 bp, Zea mays
agactccgcccgctggcttac

SEQ ID NO: 3861 - DNA, 21 bp, Zea mays
catgttaggttctttgccgag

SEQ ID NO: 3862 - DNA, 21 bp, Zea mays
cccccagcgcttacaggctca

SEQ ID NO: 3863 - DNA, 21 bp, Zea mays
cctacgtggcagccgatgtgg

SEQ ID NO: 3864 - DNA, 21 bp, Zea mays
gttggcactcggcaaagactg

SEQ ID NO: 3865 - DNA, 21 bp, Zea mays
ttggcactcggcaaagtctgt

SEQ ID NO: 3866 - DNA, 21 bp, Zea mays
actcggaatcgttccagctaa

SEQ ID NO: 3867 - DNA, 21 bp, Zea mays
cgcaaccgcccttcgtcgtcg

SEQ ID NO: 3868 - DNA, 21 bp, Zea mays
gtggctcccaaactagcccta

SEQ ID NO: 3869 - DNA, 21 bp, Zea mays
cgtggatcagcccggtctgga

SEQ ID NO: 3870 - DNA, 21 bp, Zea mays
aggaggaccgacaacaatgac

SEQ ID NO: 3871 - DNA, 21 bp, Zea mays
gggaccactaccgcagcatca

SEQ ID NO: 3872 - DNA, 21 bp, Zea mays
ccacggcgaagactgcgccca

SEQ ID NO: 3873 - DNA, 21 bp, Zea mays
tccacgagcacgtttcggcct

SEQ ID NO: 3874 - DNA, 21 bp, Zea mays
tggcctttcgccgagcacttg

SEQ ID NO: 3875 - DNA, 21 bp, Zea mays
atatgaagaagcaacaacaac

SEQ ID NO: 3876 - DNA, 21 bp, Zea mays
acaaaccaacatgggtctttt

SEQ ID NO: 3877 - DNA, 21 bp, Zea mays
agtcactatgaggtcttcgac

SEQ ID NO: 3878 - DNA, 21 bp, Zea mays
acgcaccaggtccaaaatgtc

SEQ ID NO: 3879 - DNA, 21 bp, Zea mays
atcggcacgccagccgtccgc

SEQ ID NO: 3880 - DNA, 21 bp, Zea mays
agatcggcggcactcggcaaa

SEQ ID NO: 3881 - DNA, 21 bp, Zea mays
ttgaacccgttcggtctccct

SEQ ID NO: 3882 - DNA, 21 bp, Zea mays
tgacagaaacgaacaaggcct

SEQ ID NO: 3883 - DNA, 21 bp, Zea mays
tgttagtggccttgtcggact

SEQ ID NO: 3884 - DNA, 21 bp, Zea mays
tatttggttgcctgcacaagg

SEQ ID NO: 3885 - DNA, 21 bp, Zea mays
attcccgtcgcaacgcacggg

SEQ ID NO: 3886 - DNA, 21 bp, Zea mays
ggagacactcggcaaagacgt

SEQ ID NO: 3887 - DNA, 21 bp, Zea mays
aaacactatgaggtcttcgac

SEQ ID NO: 3888 - DNA, 21 bp, Zea mays
ctgtctgataggcttcggcct

SEQ ID NO: 3889 - DNA, 21 bp, Zea mays
agtttctttgccgagtgtttt

SEQ ID NO: 3890 - DNA, 21 bp, Zea mays
agagtctttgccgagtgtttt

SEQ ID NO: 3891 - DNA, 21 bp, Zea mays
gcagtctcgaagtcaaaccaa

SEQ ID NO: 3892 - DNA, 21 bp, Zea mays
attatgtccgacggctgtcgt

SEQ ID NO: 3893 - DNA, 21 bp, Zea mays
gttctttgccgagtgctatgg

SEQ ID NO: 3894 - DNA, 21 bp, Zea mays
ttggatagcctgcttcactct

SEQ ID NO: 3895 - DNA, 21 bp, Zea mays
gcggttatgagtacgaccggg

SEQ ID NO: 3896 - DNA, 21 bp, Zea mays
aggcactcggcaaagaggtcg

SEQ ID NO: 3897 - DNA, 21 bp, Zea mays
acctcggcgccatagatcttg

SEQ ID NO: 3898 - DNA, 21 bp, Zea mays
gctcggcgccacagatcttga

SEQ ID NO: 3899 - DNA, 21 bp, Zea mays
tctggcactcggcaaagactg

SEQ ID NO: 3900 - DNA, 21 bp, Zea mays
actcagtcggcagcaagagct

SEQ ID NO: 3901 - DNA, 21 bp, Zea mays
tcgatgacagcacggtctcca

SEQ ID NO: 3902 - DNA, 21 bp, Zea mays
tgcttctttgtcgagtgccag

SEQ ID NO: 3903 - DNA, 21 bp, Zea mays
accaagtcgtggtcacatctt

SEQ ID NO: 3904 - DNA, 21 bp, Zea mays
taaatggaccacccgctgggt

SEQ ID NO: 3905 - DNA, 21 bp, Zea mays
ctgcctcgcgaactcctcgtc

SEQ ID NO: 3906 - DNA, 21 bp, Zea mays
agccgaggcgattgccgcctt

SEQ ID NO: 3907 - DNA, 21 bp, Zea mays
tggcactcggcaaagtctttg

SEQ ID NO: 3908 - DNA, 21 bp, Zea mays
agacgggccttttcgggcttg

SEQ ID NO: 3909 - DNA, 21 bp, Zea mays
aactgcggcgggaaaagtgtg

SEQ ID NO: 3910 - DNA, 21 bp, Zea mays
taaggttagtcgttcgaattg

SEQ ID NO: 3911 - DNA, 21 bp, Zea mays
cgatctccactgcgcgcacct

SEQ ID NO: 3912 - DNA, 21 bp, Zea mays
tgcaataatgcacatgaatgc

SEQ ID NO: 3913 - DNA, 21 bp, Zea mays
taacttctttgccgagtgcct

SEQ ID NO: 3914 - DNA, 21 bp, Zea mays
atctccgccgttcaacccaga

SEQ ID NO: 3915 - DNA, 21 bp, Zea mays
ccctgcactcagtcgtgttca

SEQ ID NO: 3916 - DNA, 21 bp, Zea mays
catccaaccaaacacatccta

SEQ ID NO: 3917 - DNA, 21 bp, Zea mays
accacagggtcctcgaccttg

SEQ ID NO: 3918 - DNA, 21 bp, Zea mays
cgcccgtgctgcggcgtacac

SEQ ID NO: 3919 - DNA, 21 bp, Zea mays
cttttttgccgagtgctatgg

SEQ ID NO: 3920 - DNA, 21 bp, Zea mays
ctcagcgtcataggctatggc

SEQ ID NO: 3921 - DNA, 21 bp, Zea mays
cacgggcactcggcaaagaaa

SEQ ID NO: 3922 - DNA, 21 bp, Zea mays
gctggacactcggcaaagcct

SEQ ID NO: 3923 - DNA, 21 bp, Zea mays
atggtatcagagccgaccctc

SEQ ID NO: 3924 - DNA, 21 bp, Zea mays
gcccaccggcacttaacacca

SEQ ID NO: 3925 - DNA, 21 bp, Zea mays
tagccgtcggacataagctta

SEQ ID NO: 3926 - DNA, 21 bp, Zea mays
ggtcccgttgcaacgcacggg

SEQ ID NO: 3927 - DNA, 21 bp, Zea mays
ataaggtcttgttcgtttgtg

SEQ ID NO: 3928 - DNA, 21 bp, Zea mays
cctcccaagttattgggccca

SEQ ID NO: 3929 - DNA, 21 bp, Zea mays
tgccaggaccagccgatccat

SEQ ID NO: 3930 - DNA, 21 bp, Zea mays
ccttggcgccgtagatcttgg

SEQ ID NO: 3931 - DNA, 21 bp, Zea mays
acaagtcattcaggcttacac

SEQ ID NO: 3932 - DNA, 21 bp, Zea mays
cgatcatcgacaacggcctct

SEQ ID NO: 3933 - DNA, 21 bp, Zea mays
agattcgtggggcgggtacac

SEQ ID NO: 3934 - DNA, 21 bp, Zea mays
taagccgtcgcaacgcacggg

SEQ ID NO: 3935 - DNA, 21 bp, Zea mays
gtgcagtcatcccgagggagt

SEQ ID NO: 3936 - DNA, 21 bp, Zea mays
aggctccgcccgctggcttac

SEQ ID NO: 3937 - DNA, 21 bp, Zea mays
acagaccaacacgagtctttt

SEQ ID NO: 3938 - DNA, 21 bp, Zea mays
tggcactgagccgcttcaggg

SEQ ID NO: 3939 - DNA, 21 bp, Zea mays
ggtacccacgttcctaatacg

SEQ ID NO: 3940 - DNA, 21 bp, Zea mays
cagatcgccgtggtttggccg

SEQ ID NO: 3941 - DNA, 21 bp, Zea mays
tcccggaatcgttccagctaa

SEQ ID NO: 3942 - DNA, 21 bp, Zea mays
cttaggtcttgttcgtttgtg

SEQ ID NO: 3943 - DNA, 21 bp, Zea mays
cctatcgagcaactcagcaag

SEQ ID NO: 3944 - DNA, 21 bp, Zea mays
cctgtttggcacagcttattt

SEQ ID NO: 3945 - DNA, 21 bp, Zea mays
cttacgtggcagccgatgtgg

SEQ ID NO: 3946 - DNA, 21 bp, Zea mays
gtgctgctggtgtagatgtgc

SEQ ID NO: 3947 - DNA, 21 bp, Zea mays
cctgcaaccaaacacatccta

SEQ ID NO: 3948 - DNA, 21 bp, Zea mays
tgctcggcgccatagcctatg

SEQ ID NO: 3949 - DNA, 21 bp, Zea mays
ggccacacaccaaactagcct

SEQ ID NO: 3950 - DNA, 21 bp, Zea mays
actcagtcatcccgagggagt

SEQ ID NO: 3951 - DNA, 21 bp, Zea mays
atgaatccattttcctgtcca

SEQ ID NO: 3952 - DNA, 21 bp, Zea mays
cggcactatgaggtcttcgac

SEQ ID NO: 3953 - DNA, 21 bp, Zea mays
gatacaaacgaacaaggcctt

SEQ ID NO: 3954 - DNA, 21 bp, Zea mays
tggtgcagacactcggcaaag

SEQ ID NO: 3955 - DNA, 21 bp, Zea mays
gggctctttgccgagtgtcac

SEQ ID NO: 3956 - DNA, 21 bp, Zea mays
cttttccaccctctagccaac

SEQ ID NO: 3957 - DNA, 21 bp, Zea mays
tctgtagtgccagtcactgaa

SEQ ID NO: 3958 - DNA, 21 bp, Zea mays
ggtgtttgggaacaaagtttt

SEQ ID NO: 3959 - DNA, 21 bp, Zea mays
ggctttattttaattcccgtc

SEQ ID NO: 3960 - DNA, 21 bp, Zea mays
ccgagcgcagactagccacgg

SEQ ID NO: 3961 - DNA, 21 bp, Zea mays
taggttattttcggcggcttc

SEQ ID NO: 3962 - DNA, 21 bp, Zea mays
gtggttattttcggcggcttc

SEQ ID NO: 3963 - DNA, 21 bp, Zea mays
cactctcctctcatccatgac

SEQ ID NO: 3964 - DNA, 21 bp, Zea mays
tctttgccgtgtgtctgagac

SEQ ID NO: 3965 - DNA, 21 bp, Zea mays
cctttgccgtgtgtctcagac

SEQ ID NO: 3966 - DNA, 21 bp, Zea mays
caaatggcactcggcaaagaa

SEQ ID NO: 3967 - DNA, 21 bp, Zea mays
ggatgttcgccgccaagatct

SEQ ID NO: 3968 - DNA, 21 bp, Zea mays
atgggtacccacgttcctaac

SEQ ID NO: 3969 - DNA, 21 bp, Zea mays
gaatgctgagccccgacatgt

SEQ ID NO: 3970 - DNA, 21 bp, Zea mays
aattggtctcaaccaaagttt

SEQ ID NO: 3971 - DNA, 21 bp, Zea mays
gaccaaagccgtcggacataa

SEQ ID NO: 3972 - DNA, 21 bp, Zea mays
taagcttagacaaagtgtggc

SEQ ID NO: 3973 - DNA, 21 bp, Zea mays
cctcacttgccacactttgcc

SEQ ID NO: 3974 - DNA, 21 bp, Zea mays
cccatcgccgtggtttggccg

SEQ ID NO: 3975 - DNA, 21 bp, Zea mays
aatactttgccgagtgccttt

SEQ ID NO: 3976 - DNA, 21 bp, Zea mays
ttttctttgtcgagtgctttt

SEQ ID NO: 3977 - DNA, 21 bp, Zea mays
aaaaggtcttgttcgtttgtg

SEQ ID NO: 3978 - DNA, 21 bp, Zea mays
cctgggccttaagtaaggtct

SEQ ID NO: 3979 - DNA, 21 bp, Zea mays
gtgactcccaaactagcccta

SEQ ID NO: 3980 - DNA, 21 bp, Zea mays
gcgtcacgatgcccgatcttc

SEQ ID NO: 3981 - DNA, 21 bp, Zea mays
tctgttccagcagaaacgaac

SEQ ID NO: 3982 - DNA, 21 bp, Zea mays
ctggcactatactaaccggac

SEQ ID NO: 3983 - DNA, 21 bp, Zea mays
ttgcatttcgccgacactcgg

SEQ ID NO: 3984 - DNA, 21 bp, Zea mays
attgcgtcagcatcctcgagg

SEQ ID NO: 3985 - DNA, 21 bp, Zea mays
gcaaagacgcaattggcccag

SEQ ID NO: 3986 - DNA, 21 bp, Zea mays
gtcctaatccgactgcggctg

SEQ ID NO: 3987 - DNA, 21 bp, Zea mays
aagtgcgcacaaaagactcgt

SEQ ID NO: 3988 - DNA, 21 bp, Zea mays
acgtcgctagatggcggagac

SEQ ID NO: 3989 - DNA, 21 bp, Zea mays
agcggggcgcgatctggttga

SEQ ID NO: 3990 - DNA, 21 bp, Zea mays
gtttgacttctgcgcagtctt

SEQ ID NO: 3991 - DNA, 21 bp, Zea mays
catcttaggccttgttcgttt

SEQ ID NO: 3992 - DNA, 21 bp, Zea mays
ggtgcttccaaacagggccta

SEQ ID NO: 3993 - DNA, 21 bp, Zea mays
aatcgcgttctttgccgagtg

SEQ ID NO: 3994 - DNA, 21 bp, Zea mays
aagtactcggcaaagaaggct

SEQ ID NO: 3995 - DNA, 21 bp, Zea mays
aaagctgacagaagagagtga

SEQ ID NO: 3996 - DNA, 21 bp, Zea mays
cgaaaaaaacactcggcaaag

SEQ ID NO: 3997 - DNA, 21 bp, Zea mays
agccagagccgaagctgaaaa

SEQ ID NO: 3998 - DNA, 21 bp, Zea mays
aacgagcacagtccgccgcat

SEQ ID NO: 3999 - DNA, 21 bp, Zea mays
aagcaggcttagtgccgtgct

SEQ ID NO: 4000 - DNA, 21 bp, Zea mays
ccaccagcgcttacaggctca

SEQ ID NO: 4001 - DNA, 21 bp, Zea mays
tcgtgccacgccttcggtcca

SEQ ID NO: 4002 - DNA, 21 bp, Zea mays
taggtcgccgtggtttggccg

SEQ ID NO: 4003 - DNA, 21 bp, Zea mays
ataagaacgtgggtacccacg

SEQ ID NO: 4004 - DNA, 21 bp, Zea mays
tagatcgccgtggtttggccg

SEQ ID NO: 4005 - DNA, 21 bp, Zea mays
gccacaccaggaggacgacgc

SEQ ID NO: 4006 - DNA, 21 bp, Zea mays
aacggctggcactcggcaaag

SEQ ID NO: 4007 - DNA, 21 bp, Zea mays
ggccgtctctaggaagttagc

SEQ ID NO: 4008 - DNA, 21 bp, Zea mays
tttctttgccgagtgctatgg

SEQ ID NO: 4009 - DNA, 21 bp, Zea mays
cttctttgccgagtgctatgg

SEQ ID NO: 4010 - DNA, 21 bp, Zea mays
taatccgaccaatcttgcttg

SEQ ID NO: 4011 - DNA, 21 bp, Zea mays
ctgtaacgcacggacactcac

SEQ ID NO: 4012 - DNA, 21 bp, Zea mays
cttggtcggttagatctagat

SEQ ID NO: 4013 - DNA, 21 bp, Zea mays
cgcagctcggcgccaagatct

SEQ ID NO: 4014 - DNA, 21 bp, Zea mays
ttgcttctttgccgagtgcca

SEQ ID NO: 4015 - DNA, 21 bp, Zea mays
cacagcgtcagggccttcgca

SEQ ID NO: 4016 - DNA, 21 bp, Zea mays
tccttaggctggcatctcggc

SEQ ID NO: 4017 - DNA, 21 bp, Zea mays
atgcacgccgtctgcaggatg

SEQ ID NO: 4018 - DNA, 21 bp, Zea mays
tgtcactgagccgcttcaggg

SEQ ID NO: 4019 - DNA, 21 bp, Zea mays
caccacactcggcaaagaagc

SEQ ID NO: 4020 - DNA, 21 bp, Zea mays
tccaatagccgtgccgggctt

SEQ ID NO: 4021 - DNA, 21 bp, Zea mays
gccacgaaccaaacaggccat

SEQ ID NO: 4022 - DNA, 21 bp, Zea mays
atcgtcatcgtcgtcgtcgtc

SEQ ID NO: 4023 - DNA, 21 bp, Zea mays
ttgtccattgagcctgctctg

SEQ ID NO: 4024 - DNA, 21 bp, Zea mays
tcactcatccgagcctgctct

SEQ ID NO: 4025 - DNA, 21 bp, Zea mays
aactgacactcggcaaaggct

SEQ ID NO: 4026 - DNA, 21 bp, Zea mays
atccggaatcgttccagctaa

SEQ ID NO: 4027 - DNA, 21 bp, Zea mays
tatctggcactcggcaaagaa

SEQ ID NO: 4028 - DNA, 21 bp, Zea mays
gagcttctttgccgagtgcca

SEQ ID NO: 4029 - DNA, 21 bp, Zea mays
gctttggcactcggcaaagaa

SEQ ID NO: 4030 - DNA, 21 bp, Zea mays
gcatcatgtgcaccagtcttc

SEQ ID NO: 4031 - DNA, 21 bp, Zea mays
gagaccactaccgcagcatca

SEQ ID NO: 4032 - DNA, 21 bp, Zea mays
gaggtccccttcgctgaactc

SEQ ID NO: 4033 - DNA, 21 bp, Zea mays
caggccttgttcgtttgtgtc

SEQ ID NO: 4034 - DNA, 21 bp, Zea mays
acaggcaaatcatccctggct

SEQ ID NO: 4035 - DNA, 21 bp, Zea mays
gcttcaaacaccctgggttgc

SEQ ID NO: 4036 - DNA, 21 bp, Zea mays
gcaacgcacggtcactcacct

SEQ ID NO: 4037 - DNA, 21 bp, Zea mays
cctcggcgccgtagatcttgg

SEQ ID NO: 4038 - DNA, 21 bp, Zea mays
acgttggcactcggcaaagaa

SEQ ID NO: 4039 - DNA, 21 bp, Zea mays
tgcaagcttgccttcgcctca

SEQ ID NO: 4040 - DNA, 21 bp, Zea mays
gctgataagcactggcgaagt

SEQ ID NO: 4041 - DNA, 21 bp, Zea mays
gacctcgctgcgacttagttc

SEQ ID NO: 4042 - DNA, 21 bp, Zea mays
cctcggcgccaagatctatgg

SEQ ID NO: 4043 - DNA, 21 bp, Zea mays
tcagcactcggcaaagtcttt

SEQ ID NO: 4044 - DNA, 21 bp, Zea mays
tccggcatccgatggcttcca

SEQ ID NO: 4045 - DNA, 21 bp, Zea mays
acggagcaagcacatccggct

SEQ ID NO: 4046 - DNA, 21 bp, Zea mays
aggtgacactcggcaaaggct

SEQ ID NO: 4047 - DNA, 21 bp, Zea mays
gttttcaacggtcgtcatgcg

SEQ ID NO: 4048 - DNA, 21 bp, Zea mays
cggagcaatctcaccgccggt

SEQ ID NO: 4049 - DNA, 21 bp, Zea mays
atttgctccgataccagctgt

SEQ ID NO: 4050 - DNA, 21 bp, Zea mays
cgacactatgaggtcttcgac

SEQ ID NO: 4051 - DNA, 21 bp, Zea mays
gccctgcactcagtcgtgttt

SEQ ID NO: 4052 - DNA, 21 bp, Zea mays
aatcgtgcaagtaggtctctt

SEQ ID NO: 4053 - DNA, 21 bp, Zea mays
cctcgccgctatcgcttacac

SEQ ID NO: 4054 - DNA, 21 bp, Zea mays
ggttgcctctaggaagttagc

SEQ ID NO: 4055 - DNA, 21 bp, Zea mays
ttgctcatccgagcctgctct

SEQ ID NO: 4056 - DNA, 21 bp, Zea mays
ctctgcccagtccgtctcgcc

SEQ ID NO: 4057 - DNA, 21 bp, Zea mays
atctacgcaggacttcgccaa

SEQ ID NO: 4058 - DNA, 21 bp, Zea mays
gcgttagtccagcagacactc

SEQ ID NO: 4059 - DNA, 21 bp, Zea mays
aggtggcgggccgtcggacat

SEQ ID NO: 4060 - DNA, 21 bp, Zea mays
catgtggatagggccaagaac

SEQ ID NO: 4061 - DNA, 21 bp, Zea mays
agtggacactcggcaaaggct

SEQ ID NO: 4062 - DNA, 21 bp, Zea mays
ttgcataatgcacatgaatgc

SEQ ID NO: 4063 - DNA, 21 bp, Zea mays
tatctcgtcgtcaacctcgcc

SEQ ID NO: 4064 - DNA, 21 bp, Zea mays
cacccaaaatgctcctgattg

SEQ ID NO: 4065 - DNA, 21 bp, Zea mays
ggcgaagacgctgtctccgtc

SEQ ID NO: 4066 - DNA, 21 bp, Zea mays
ttaacactcggcaaaaagccg

SEQ ID NO: 4067 - DNA, 21 bp, Zea mays
aaaatgtttgcagcctctcac

SEQ ID NO: 4068 - DNA, 21 bp, Zea mays
tggacccacaacacagtgttt

SEQ ID NO: 4069 - DNA, 21 bp, Zea mays
ggcccgagtattttttggtcg

SEQ ID NO: 4070 - DNA, 21 bp, Zea mays
cttcgacggccaaagtcgtcg

SEQ ID NO: 4071 - DNA, 21 bp, Zea mays
gtgggtacccacgctcctaat

SEQ ID NO: 4072 - DNA, 21 bp, Zea mays
tgaccatctcacaccagcaga

SEQ ID NO: 4073 - DNA, 21 bp, Zea mays
ggtcttgttcgtttgcgtcgg

SEQ ID NO: 4074 - DNA, 21 bp, Zea mays
atggttccgttgcaacgcacg

SEQ ID NO: 4075 - DNA, 21 bp, Zea mays
ccgggcgtggacggaattcgg

SEQ ID NO: 4076 - DNA, 21 bp, Zea mays
gaaggtcattcaggcttacac

SEQ ID NO: 4077 - DNA, 21 bp, Zea mays
tggcactcggcaaagaaggct

SEQ ID NO: 4078 - DNA, 21 bp, Zea mays
tcaagtgaagacggagccagc

SEQ ID NO: 4079 - DNA, 21 bp, Zea mays
gcggcaccaaacatgtccagt

SEQ ID NO: 4080 - DNA, 21 bp, Zea mays
atatttagccacaaaccaaac

SEQ ID NO: 4081 - DNA, 21 bp, Zea mays
ggcattgttcgtttgcgtcgg

SEQ ID NO: 4082 - DNA, 21 bp, Zea mays
aggtggtgcatcatgggttca

SEQ ID NO: 4083 - DNA, 21 bp, Zea mays
ctggctcccaaactagcccta

SEQ ID NO: 4084 - DNA, 21 bp, Zea mays
tgccttctttgccgagtgctt

SEQ ID NO: 4085 - DNA, 21 bp, Zea mays
cttgacactcggcaaagaagc

SEQ ID NO: 4086 - DNA, 21 bp, Zea mays
ctaagacccaaggtcctgttt

SEQ ID NO: 4087 - DNA, 21 bp, Zea mays
cgtagcaacgcacgggcacat

SEQ ID NO: 4088 - DNA, 21 bp, Zea mays
ggacaaagccgtcggacataa

SEQ ID NO: 4089 - DNA, 21 bp, Zea mays
agctaagacctaggccgaaac

SEQ ID NO: 4090 - DNA, 21 bp, Zea mays
ccacgtcgtgtgtttaggttt

SEQ ID NO: 4091 - DNA, 21 bp, Zea mays
ggacactcggcaaagaggtcg

SEQ ID NO: 4092 - DNA, 21 bp, Zea mays
aggggcggttcaaccggtttt

SEQ ID NO: 4093 - DNA, 21 bp, Zea mays
ggcctatcctcatttttgtga

SEQ ID NO: 4094 - DNA, 21 bp, Zea mays
actatgtgttacctcggcgtc

SEQ ID NO: 4095 - DNA, 21 bp, Zea mays
acactcatccgagcctgctct

SEQ ID NO: 4096 - DNA, 21 bp, Zea mays
gactctactcagaagcactac

SEQ ID NO: 4097 - DNA, 21 bp, Zea mays
caccggacacagtagccgcag

SEQ ID NO: 4098 - DNA, 21 bp, Zea mays
tcgccgtacgaagtcgtcgcc

SEQ ID NO: 4099 - DNA, 21 bp, Zea mays
tgatacttactcctggcagct

SEQ ID NO: 4100 - DNA, 21 bp, Zea mays
ctctctcctctcatccatgac

SEQ ID NO: 4101 - DNA, 21 bp, Zea mays
ccgtgcagtaccagtcactga

SEQ ID NO: 4102 - DNA, 21 bp, Zea mays
tactacaccgtagtgggctgc

SEQ ID NO: 4103 - DNA, 21 bp, Zea mays
acggtgcaatccggtcgagcc

SEQ ID NO: 4104 - DNA, 21 bp, Zea mays
gtgaccactaccgcagcatca

SEQ ID NO: 4105 - DNA, 21 bp, Zea mays
agatctttgccgagtgctttt

SEQ ID NO: 4106 - DNA, 21 bp, Zea mays
caacacaaacgaacaaggcct

SEQ ID NO: 4107 - DNA, 21 bp, Zea mays
atgtctggccaagtcaccctc

SEQ ID NO: 4108 - DNA, 21 bp, Zea mays
caatttgtaggagtagtcggc

SEQ ID NO: 4109 - DNA, 21 bp, Zea mays
acaagctccgataccagctgt

SEQ ID NO: 4110 - DNA, 21 bp, Zea mays
agtcggactagagtcaagctc

SEQ ID NO: 4111 - DNA, 21 bp, Zea mays
ccgctcctgaaatcggtcgta

SEQ ID NO: 4112 - DNA, 21 bp, Zea mays
tctctcatccgagcctgctct

SEQ ID NO: 4113 - DNA, 21 bp, Zea mays
ggacaagcagctcgtcctcga

SEQ ID NO: 4114 - DNA, 21 bp, Zea mays
gtcttcgggagatctgcagag

SEQ ID NO: 4115 - DNA, 21 bp, Zea mays
aatcaaaaagcaacgtcgcta

SEQ ID NO: 4116 - DNA, 21 bp, Zea mays
gcctcggacgctagagtcaag

SEQ ID NO: 4117 - DNA, 21 bp, Zea mays
ctgaaaaacactcggcgaagt

SEQ ID NO: 4118 - DNA, 21 bp, Zea mays
tatggcattcggtgtcagctg

SEQ ID NO: 4119 - DNA, 21 bp, Zea mays
gatcgcagacactcggcaaag

SEQ ID NO: 4120 - DNA, 21 bp, Zea mays
tccagctggcactcggcaaag

SEQ ID NO: 4121 - DNA, 21 bp, Zea mays
ccctgctggcactcggcaaag

SEQ ID NO: 4122 - DNA, 21 bp, Zea mays
gtctcacttcgccagaccgcc

SEQ ID NO: 4123 - DNA, 21 bp, Zea mays
catttggcgcgccaggtaggg

SEQ ID NO: 4124 - DNA, 21 bp, Zea mays
caacgcacggacaaccgacta

SEQ ID NO: 4125 - DNA, 21 bp, Zea mays
tgcttaggccttgttcgtttc

SEQ ID NO: 4126 - DNA, 21 bp, Zea mays
tgattaccaacgcagcctgat

SEQ ID NO: 4127 - DNA, 21 bp, Zea mays
actctcctgcgtgttcgagaa

SEQ ID NO: 4128 - DNA, 21 bp, Zea mays
gccacgcctcgcagacttgct

SEQ ID NO: 4129 - DNA, 21 bp, Zea mays
ctcccatgcgcaaaatgcatc

SEQ ID NO: 4130 - DNA, 21 bp, Zea mays
ccgccgtacgaagtcgtcgcc

SEQ ID NO: 4131 - DNA, 21 bp, Zea mays
gtctccgttgcaacgcacggg

SEQ ID NO: 4132 - DNA, 21 bp, Zea mays
tcctgcgcgaagtccacagcg

SEQ ID NO: 4133 - DNA, 21 bp, Zea mays
atacgggccttttcgggcttg

SEQ ID NO: 4134 - DNA, 21 bp, Zea mays
cgtaggccctgtttggcacag

SEQ ID NO: 4135 - DNA, 21 bp, Zea mays
cgtccatccgaagtctcgaga

SEQ ID NO: 4136 - DNA, 21 bp, Zea mays
ctgatcagccgtatcgcggag

SEQ ID NO: 4137 - DNA, 21 bp, Zea mays
ggccgccggagcgtaacaccc

SEQ ID NO: 4138 - DNA, 21 bp, Zea mays
tcgtcacttgagggtcaaacc

SEQ ID NO: 4139 - DNA, 21 bp, Zea mays
tacggcaaccaatcaggccct

SEQ ID NO: 4140 - DNA, 21 bp, Zea mays
cacgtccatcaacggtcacat

SEQ ID NO: 4141 - DNA, 21 bp, Zea mays
tccgccttgccacaactgaag

SEQ ID NO: 4142 - DNA, 21 bp, Zea mays
atcctttgccgagtgctatgg

SEQ ID NO: 4143 - DNA, 21 bp, Zea mays
aaagacaacagttcctgccga

SEQ ID NO: 4144 - DNA, 21 bp, Zea mays
tcacggcgaagactgcgccca

SEQ ID NO: 4145 - DNA, 21 bp, Zea mays
ggttgtttgacttctgcgcag

SEQ ID NO: 4146 - DNA, 21 bp, Zea mays
tttgacactcggcaaagaagc

SEQ ID NO: 4147 - DNA, 21 bp, Zea mays
tgcttaagtgcgtcaccgaaa

SEQ ID NO: 4148 - DNA, 21 bp, Zea mays
ggggctcccaaactagcccta

SEQ ID NO: 4149 - DNA, 21 bp, Zea mays
atctgcatccatagacgtttt

SEQ ID NO: 4150 - DNA, 21 bp, Zea mays
atgggcactcggcaaagactg

SEQ ID NO: 4151 - DNA, 21 bp, Zea mays
tggtggcactcggcaaagaaa

SEQ ID NO: 4152 - DNA, 21 bp, Zea mays
gatagctcgtttagctcgcga

SEQ ID NO: 4153 - DNA, 21 bp, Zea mays
accatggattctcaggcgcca

SEQ ID NO: 4154 - DNA, 21 bp, Zea mays
ttttctggtcaccaaatcagc

SEQ ID NO: 4155 - DNA, 21 bp, Zea mays
ggcgtctttgccgagtgtcac

SEQ ID NO: 4156 - DNA, 21 bp, Zea mays
caccatgcgccgtcgcaatgg

SEQ ID NO: 4157 - DNA, 21 bp, Zea mays
gcactcggcaaagtctttgcc

SEQ ID NO: 4158 - DNA, 21 bp, Zea mays
gggcacggcccgtttagcacg

SEQ ID NO: 4159 - DNA, 21 bp, Zea mays
ccatttagctgctccgttgga

SEQ ID NO: 4160 - DNA, 21 bp, Zea mays
agccacacatcacaagcggtt

SEQ ID NO: 4161 - DNA, 21 bp, Zea mays
ctcacatccggtcgttttggt

SEQ ID NO: 4162 - DNA, 21 bp, Zea mays
aactagctagactacaacgga

SEQ ID NO: 4163 - DNA, 21 bp, Zea mays
tagcctttcgccgagcacttg

SEQ ID NO: 4164 - DNA, 21 bp, Zea mays
ggcctccgcctgagcggggag

SEQ ID NO: 4165 - DNA, 21 bp, Zea mays
gttctcgttgcaacgcacggg

SEQ ID NO: 4166 - DNA, 21 bp, Zea mays
gctggaatgggcttggcccag

SEQ ID NO: 4167 - DNA, 21 bp, Zea mays
cataatactgatggttgcaat

SEQ ID NO: 4168 - DNA, 21 bp, Zea mays
ttaactccgtagcaacgcacg

SEQ ID NO: 4169 - DNA, 21 bp, Zea mays
ttaccactgaactacgctcgc

SEQ ID NO: 4170 - DNA, 21 bp, Zea mays
ccgtctcccttcccataagca

SEQ ID NO: 4171 - DNA, 21 bp, Zea mays
cggttcttcggttcggttcgg

SEQ ID NO: 4172 - DNA, 21 bp, Zea mays
tatgttctgtgtttggtaatc

SEQ ID NO: 4173 - DNA, 21 bp, Zea mays
tccacaaccaaacgcaccctt

SEQ ID NO: 4174 - DNA, 21 bp, Zea mays
gagccgtcggacttaattcag

SEQ ID NO: 4175 - DNA, 21 bp, Zea mays
gcgtcctccttcctctcgtcg

SEQ ID NO: 4176 - DNA, 21 bp, Zea mays
acacagtcatcccgagggagt

SEQ ID NO: 4177 - DNA, 21 bp, Zea mays
accgtggcactcggcaaagaa

SEQ ID NO: 4178 - DNA, 21 bp, Zea mays
ggtcgcctctaggaagttagc

SEQ ID NO: 4179 - DNA, 21 bp, Zea mays
tcgtggcggcccggcgcggcg

SEQ ID NO: 4180 - DNA, 21 bp, Zea mays
cagctcggcgccataggctgt

SEQ ID NO: 4181 - DNA, 21 bp, Zea mays
catagctgtctgaggtctttg

SEQ ID NO: 4182 - DNA, 21 bp, Zea mays
gaccgggcggcccgaatgtac

SEQ ID NO: 4183 - DNA, 21 bp, Zea mays
ttttctttgccgagtgctttt

SEQ ID NO: 4184 - DNA, 21 bp, Zea mays
agtcatcaggcacacaccacc

SEQ ID NO: 4185 - DNA, 21 bp, Zea mays
acagtgtcttcccgtcactgg

SEQ ID NO: 4186 - DNA, 21 bp, Zea mays
agagtgacttggccgtccatc

SEQ ID NO: 4187 - DNA, 21 bp, Zea mays
tggagccttctttgtcgagtg

SEQ ID NO: 4188 - DNA, 21 bp, Zea mays
tgctccacgtctgttagcgca

SEQ ID NO: 4189 - DNA, 21 bp, Zea mays
ggccaaagccgtcggacataa

SEQ ID NO: 4190 - DNA, 21 bp, Zea mays
gactgccgtcgtgcagtggcc

SEQ ID NO: 4191 - DNA, 21 bp, Zea mays
gtggctttgccgagtgctttt

SEQ ID NO: 4192 - DNA, 21 bp, Zea mays
accctaaagggttctgtaccc

SEQ ID NO: 4193 - DNA, 21 bp, Zea mays
gcgtcctctaaacggtcctct

SEQ ID NO: 4194 - DNA, 21 bp, Zea mays
gcatccgtctccgcaaaacac

SEQ ID NO: 4195 - DNA, 21 bp, Zea mays
caagagcacaagcgggatcct

SEQ ID NO: 4196 - DNA, 21 bp, Zea mays
agcaaagtctttgccgagtgt

SEQ ID NO: 4197 - DNA, 21 bp, Zea mays
aaactctttgccgagtgtttt

SEQ ID NO: 4198 - DNA, 21 bp, Zea mays
ggctgtttgacttctgcgcag

SEQ ID NO: 4199 - DNA, 21 bp, Zea mays
ttcggcgccatagcctatggc

SEQ ID NO: 4200 - DNA, 21 bp, Zea mays
aacaaaacaccccgctccaac

SEQ ID NO: 4201 - DNA, 21 bp, Zea mays
agctcggcgccataggctatg

SEQ ID NO: 4202 - DNA, 21 bp, Zea mays
aagctcggcgccatagcctat

SEQ ID NO: 4203 - DNA, 21 bp, Zea mays
agatcttggcgccgagctagg

SEQ ID NO: 4204 - DNA, 21 bp, Zea mays
tgtcacactcggcaaagcctt

SEQ ID NO: 4205 - DNA, 21 bp, Zea mays
ccatcccgctctcacagtcac

SEQ ID NO: 4206 - DNA, 21 bp, Zea mays
gagggcagaaacgaatgtggt

SEQ ID NO: 4207 - DNA, 21 bp, Zea mays
gaatacactcggcaaagcctt

SEQ ID NO: 4208 - DNA, 21 bp, Zea mays
ttgctcggcgtcatagcctat

SEQ ID NO: 4209 - DNA, 21 bp, Zea mays
aatccccattgccatctctac

SEQ ID NO: 4210 - DNA, 21 bp, Zea mays
tgccagcaccagcccgctaat

SEQ ID NO: 4211 - DNA, 21 bp, Zea mays
gccgatgcgggtcgcagcgat

SEQ ID NO: 4212 - DNA, 21 bp, Zea mays
tgtgctttctttgtcgagtgc

SEQ ID NO: 4213 - DNA, 21 bp, Zea mays
tagagcctggctcacagcaac

SEQ ID NO: 4214 - DNA, 21 bp, Zea mays
cggatggcttctacctgcaag

SEQ ID NO: 4215 - DNA, 21 bp, Zea mays
taagacgggtcccgtcggaag

SEQ ID NO: 4216 - DNA, 21 bp, Zea mays
agggcgcagccaatattcagc

SEQ ID NO: 4217 - DNA, 21 bp, Zea mays
tggtcagtctagccgtcggac

SEQ ID NO: 4218 - DNA, 21 bp, Zea mays
ggtgagctcgctcgactcgtg

SEQ ID NO: 4219 - DNA, 21 bp, Zea mays
ccgccggacgggcacggccca

SEQ ID NO: 4220 - DNA, 21 bp, Zea mays
cgtggctaactgtgtcacact

SEQ ID NO: 4221 - DNA, 21 bp, Zea mays
acaaagtgcgcacaaaagact

SEQ ID NO: 4222 - DNA, 21 bp, Zea mays
gcacgacgttcttggctcttg

SEQ ID NO: 4223 - DNA, 21 bp, Zea mays
ggacttagcacaacaagtgcg

SEQ ID NO: 4224 - DNA, 21 bp, Zea mays
ctctccggttttgtggctctc

SEQ ID NO: 4225 - DNA, 21 bp, Zea mays
tcgcgctgctagcttcgtctt

SEQ ID NO: 4226 - DNA, 21 bp, Zea mays
aagtttctttgccgagtgcca

SEQ ID NO: 4227 - DNA, 21 bp, Zea mays
acaccccgtcttcggatctgc

SEQ ID NO: 4228 - DNA, 21 bp, Zea mays
cgtttgcatagaaggaccgct

SEQ ID NO: 4229 - DNA, 21 bp, Zea mays
tgtcttcacctgattcttggg

SEQ ID NO: 4230 - DNA, 21 bp, Zea mays
tggaacgtcgacaaccttcgc

SEQ ID NO: 4231 - DNA, 21 bp, Zea mays
gatgggggggggggggggggg

SEQ ID NO: 4232 - DNA, 21 bp, Zea mays
ctgctcccatgctccagtctt

SEQ ID NO: 4233 - DNA, 21 bp, Zea mays
taaactcacacccaaacccgc

SEQ ID NO: 4234 - DNA, 21 bp, Zea mays
cgccacaaaccaaacaggccc

SEQ ID NO: 4235 - DNA, 21 bp, Zea mays
gaacggttgcgggacgagtga

SEQ ID NO: 4236 - DNA, 21 bp, Zea mays
ccgacctatagccgcagcggt

SEQ ID NO: 4237 - DNA, 21 bp, Zea mays
gactcatagcacagtgtttag

SEQ ID NO: 4238 - DNA, 21 bp, Zea mays
agctcggcaccaagatctgtg

SEQ ID NO: 4239 - DNA, 21 bp, Zea mays
gcccggcgccaagatctatgg

SEQ ID NO: 4240 - DNA, 21 bp, Zea mays
cagctggcactcggcaaagaa

SEQ ID NO: 4241 - DNA, 21 bp, Zea mays
gcacgctggcactcggcaaag

SEQ ID NO: 4242 - DNA, 21 bp, Zea mays
gtgcgccgccggtcagagcag

SEQ ID NO: 4243 - DNA, 21 bp, Zea mays
cttccacgtgttcgatcgcgt

SEQ ID NO: 4244 - DNA, 21 bp, Zea mays
ccgagctcggcgccaagatct

SEQ ID NO: 4245 - DNA, 21 bp, Zea mays
tttgcagcccaataaaccagt

SEQ ID NO: 4246 - DNA, 21 bp, Zea mays
tcagcactatgggccgaggct

SEQ ID NO: 4247 - DNA, 21 bp, Zea mays
accacgatgtttacagccctc

SEQ ID NO: 4248 - DNA, 21 bp, Zea mays
cggaaaaaaagcacggtccag

SEQ ID NO: 4249 - DNA, 21 bp, Zea mays
ctgactccgtagcaacgcacg

SEQ ID NO: 4250 - DNA, 21 bp, Zea mays
tgctcggcgccatagactatg

SEQ ID NO: 4251 - DNA, 21 bp, Zea mays
tctaacgtgccgtgttagccc

SEQ ID NO: 4252 - DNA, 21 bp, Zea mays
tttttggcactcggcaaagaa

SEQ ID NO: 4253 - DNA, 21 bp, Zea mays
tagctcggcgccatagcctgt

SEQ ID NO: 4254 - DNA, 21 bp, Zea mays
cgccatcgctgcgacccgcat

SEQ ID NO: 4255 - DNA, 21 bp, Zea mays
gggtataagtgcggtcactgc

SEQ ID NO: 4256 - DNA, 21 bp, Zea mays
cagcagcctgctgccccacgt

SEQ ID NO: 4257 - DNA, 21 bp, Zea mays
tccgcttccaaacagggccta

SEQ ID NO: 4258 - DNA, 21 bp, Zea mays
atcgggcactcggcaaagaaa

SEQ ID NO: 4259 - DNA, 21 bp, Zea mays
cgctcgacaaaggctttgccg

SEQ ID NO: 4260 - DNA, 21 bp, Zea mays
cctagcacacgagccacaaaa

SEQ ID NO: 4261 - DNA, 21 bp, Zea mays
gacaaagtctttgccgagtgt

SEQ ID NO: 4262 - DNA, 21 bp, Zea mays
gcaaagtctttgccgagtgtc

SEQ ID NO: 4263 - DNA, 21 bp, Zea mays
cacggcattcggtgtcagctg

SEQ ID NO: 4264 - DNA, 21 bp, Zea mays
aggtatcaggcacacaccacc

SEQ ID NO: 4265 - DNA, 21 bp, Zea mays
tcatgcgcgaagtccacagcg

SEQ ID NO: 4266 - DNA, 21 bp, Zea mays
atgtttccgttgcaacgcacg

SEQ ID NO: 4267 - DNA, 21 bp, Zea mays
ggggtggtaatggatcgcgat

SEQ ID NO: 4268 - DNA, 21 bp, Zea mays
gcttattttcggcggcgtctg

SEQ ID NO: 4269 - DNA, 21 bp, Zea mays
agctattttcggcggcgtctg

SEQ ID NO: 4270 - DNA, 21 bp, Zea mays
ttgagtcactttgccgagtgt

SEQ ID NO: 4271 - DNA, 21 bp, Zea mays
atgctcggcgccataggctgt

SEQ ID NO: 4272 - DNA, 21 bp, Zea mays
agaagctgcctgtttggcagg

SEQ ID NO: 4273 - DNA, 21 bp, Zea mays
gcaggcgccgctgcagtcatt

SEQ ID NO: 4274 - DNA, 21 bp, Zea mays
ctttaccgagtgtcgcactcg

SEQ ID NO: 4275 - DNA, 21 bp, Zea mays
aagccacaacacaagtttgtc

SEQ ID NO: 4276 - DNA, 21 bp, Zea mays
gcagacactcggcaaagaagc

SEQ ID NO: 4277 - DNA, 21 bp, Zea mays
atcctaatccgtcgggtcgga

SEQ ID NO: 4278 - DNA, 21 bp, Zea mays
accctgcactcagtcgtgttt

SEQ ID NO: 4279 - DNA, 21 bp, Zea mays
cgtcagcagtagaggcgcgag

SEQ ID NO: 4280 - DNA, 21 bp, Zea mays
tgccagtcacagcgatgtacg

SEQ ID NO: 4281 - DNA, 21 bp, Zea mays
gccggccggcaacttctcact

SEQ ID NO: 4282 - DNA, 21 bp, Zea mays
ctgcgggtggggtctatcctc

SEQ ID NO: 4283 - DNA, 21 bp, Zea mays
ctctaaggaacccgtagactg

SEQ ID NO: 4284 - DNA, 21 bp, Zea mays
caaagcactcggcaaagactg

SEQ ID NO: 4285 - DNA, 21 bp, Zea mays
tgctttcttttgtcgagtgct

SEQ ID NO: 4286 - DNA, 21 bp, Zea mays
cagggagcgcgggttagattt

SEQ ID NO: 4287 - DNA, 21 bp, Zea mays
aaaaacactcggcaaagcctt

SEQ ID NO: 4288 - DNA, 21 bp, Zea mays
aagttctttgccgagtgtttt

SEQ ID NO: 4289 - DNA, 21 bp, Zea mays
ggcccgataaatgggtcggcc

SEQ ID NO: 4290 - DNA, 21 bp, Zea mays
tatgccgtcgcaacgcacggg

SEQ ID NO: 4291 - DNA, 21 bp, Zea mays
aaattagccgaaaccagagtc

SEQ ID NO: 4292 - DNA, 21 bp, Zea mays
gtccagatcgattaacggcag

SEQ ID NO: 4293 - DNA, 21 bp, Zea mays
tcgatctggaccgtccgtggc

SEQ ID NO: 4294 - DNA, 21 bp, Zea mays
acacaaacgaacaaggcctca

SEQ ID NO: 4295 - DNA, 21 bp, Zea mays
cgattaccaacgcagcctgat

SEQ ID NO: 4296 - DNA, 21 bp, Zea mays
aggcacgccgtctgcaggatg

SEQ ID NO: 4297 - DNA, 21 bp, Zea mays
tcgcactcggcaaagaaggct

SEQ ID NO: 4298 - DNA, 21 bp, Zea mays
gcaaagccctctttgccgagt

SEQ ID NO: 4299 - DNA, 21 bp, Zea mays
actggcactcggcaaagcttg

SEQ ID NO: 4300 - DNA, 21 bp, Zea mays
tgggcctcactcgtggcccgt

SEQ ID NO: 4301 - DNA, 21 bp, Zea mays
agaccgtcggacataagctta

SEQ ID NO: 4302 - DNA, 21 bp, Zea mays
tcggattgcacccggaatcgt

SEQ ID NO: 4303 - DNA, 21 bp, Zea mays
aggccgtcggacataagctta

SEQ ID NO: 4304 - DNA, 21 bp, Zea mays
acctctgtgtcgtgtctgctc

SEQ ID NO: 4305 - DNA, 21 bp, Zea mays
gggggcgagtccttgccctcc

SEQ ID NO: 4306 - DNA, 21 bp, Zea mays
ttctcgttgcaacgcacagac

SEQ ID NO: 4307 - DNA, 21 bp, Zea mays
gttagtcctaagccgacggat

SEQ ID NO: 4308 - DNA, 21 bp, Zea mays
ataaaaaaacactcggcaaag

SEQ ID NO: 4309 - DNA, 21 bp, Zea mays
ttagcactcggcaaaaagccg

SEQ ID NO: 4310 - DNA, 21 bp, Zea mays
accgggttggacagtcgagtg

SEQ ID NO: 4311 - DNA, 21 bp, Zea mays
ccatgctgctccagtgcacag

SEQ ID NO: 4312 - DNA, 21 bp, Zea mays
tagtacttactcctggcagct

SEQ ID NO: 4313 - DNA, 21 bp, Zea mays
gagggcactcggcaaagcttg

SEQ ID NO: 4314 - DNA, 21 bp, Zea mays
ggccttgtttagttgtgccgg

SEQ ID NO: 4315 - DNA, 21 bp, Zea mays
cggccgtcggacataagctta

SEQ ID NO: 4316 - DNA, 21 bp, Zea mays
agagcgcagccaatattcagc

SEQ ID NO: 4317 - DNA, 21 bp, Zea mays
actggtcactttgccgagtgt

SEQ ID NO: 4318 - DNA, 21 bp, Zea mays
cacttaggctgcgttcgtttg

SEQ ID NO: 4319 - DNA, 21 bp, Zea mays
ccgtcgtacgaagtcgtcgcc

SEQ ID NO: 4320 - DNA, 21 bp, Zea mays
ggtccagcactgacttcgaca

SEQ ID NO: 4321 - DNA, 21 bp, Zea mays
gatcgctggcactcggcaaag

SEQ ID NO: 4322 - DNA, 21 bp, Zea mays
cttgctgatttcctgctgaga

SEQ ID NO: 4323 - DNA, 21 bp, Zea mays
ctgggcctctaggaagttagc

SEQ ID NO: 4324 - DNA, 21 bp, Zea mays
gatgccgtcggacatagcgtt

SEQ ID NO: 4325 - DNA, 21 bp, Zea mays
aagattatgtccgacggctgt

SEQ ID NO: 4326 - DNA, 21 bp, Zea mays
gacactcggcaaagccgccgt

SEQ ID NO: 4327 - DNA, 21 bp, Zea mays
agggtgcactcggcaaagaaa

SEQ ID NO: 4328 - DNA, 21 bp, Zea mays
gcagcacgcctcagcttcgct

SEQ ID NO: 4329 - DNA, 21 bp, Zea mays
actggctcaaagcacggtccg

SEQ ID NO: 4330 - DNA, 21 bp, Zea mays
tgtacacgtgtcccgccagtc

SEQ ID NO: 4331 - DNA, 21 bp, Zea mays
ggcgaagtctttgccgagtgt

SEQ ID NO: 4332 - DNA, 21 bp, Zea mays
tggtggccggccggccggccg

SEQ ID NO: 4333 - DNA, 21 bp, Zea mays
tctgcgccagtcatggtgtcc

SEQ ID NO: 4334 - DNA, 21 bp, Zea mays
gcgcaaggttgagtcacagcg

SEQ ID NO: 4335 - DNA, 21 bp, Zea mays
attgacactcggcaaagaagc

SEQ ID NO: 4336 - DNA, 21 bp, Zea mays
cccgcccacgcgcccagctcc

SEQ ID NO: 4337 - DNA, 21 bp, Zea mays
ccatggcagatggcttcggat

SEQ ID NO: 4338 - DNA, 21 bp, Zea mays
ccaaactggcccagtatcttt

SEQ ID NO: 4339 - DNA, 21 bp, Zea mays
aagcaccagtttcaacggtcg

SEQ ID NO: 4340 - DNA, 21 bp, Zea mays
gagcttgttcggttagaccaa

SEQ ID NO: 4341 - DNA, 21 bp, Zea mays
gcaagtcattcaggcttacac

SEQ ID NO: 4342 - DNA, 21 bp, Zea mays
accgggcaggcaagccgcaag

SEQ ID NO: 4343 - DNA, 21 bp, Zea mays
ccctgacgcagcaccgttgga

SEQ ID NO: 4344 - DNA, 21 bp, Zea mays
cctagacgcaactagccgttg

SEQ ID NO: 4345 - DNA, 21 bp, Zea mays
cggtcctatcgggtcggatac

SEQ ID NO: 4346 - DNA, 21 bp, Zea mays
cggcttctttgccgagtgctt

SEQ ID NO: 4347 - DNA, 21 bp, Zea mays
gtgcccgtgcgttgcaacggt

SEQ ID NO: 4348 - DNA, 21 bp, Zea mays
gcctgccacagactcagccaa

SEQ ID NO: 4349 - DNA, 21 bp, Zea mays
ccatccctcgcctcccccaca

SEQ ID NO: 4350 - DNA, 21 bp, Zea mays
aagcagatactagatgtaagc

SEQ ID NO: 4351 - DNA, 21 bp, Zea mays
tggcactatgaggtcttcgac

SEQ ID NO: 4352 - DNA, 21 bp, Zea mays
ggttccgttgcaacgcacggg

SEQ ID NO: 4353 - DNA, 21 bp, Zea mays
gggcgtggacggaattcggtc

SEQ ID NO: 4354 - DNA, 21 bp, Zea mays
aggaccactaccgcagcatca

SEQ ID NO: 4355 - DNA, 21 bp, Zea mays
gaacctgtagccatcccaaac

SEQ ID NO: 4356 - DNA, 21 bp, Zea mays
acaaagtctttgccgagtgtc

SEQ ID NO: 4357 - DNA, 21 bp, Zea mays
acgcacaggcactcacctagt

SEQ ID NO: 4358 - DNA, 21 bp, Zea mays
gcgcctacaggtggggtccat

SEQ ID NO: 4359 - DNA, 21 bp, Zea mays
tacctcggcgccataggctgt

SEQ ID NO: 4360 - DNA, 21 bp, Zea mays
aaatcgtcggagtcgctcaac

SEQ ID NO: 4361 - DNA, 21 bp, Zea mays
ctggtgccctcagttttgctg

SEQ ID NO: 4362 - DNA, 21 bp, Zea mays
tgggtcttgttctgctggctg

SEQ ID NO: 4363 - DNA, 21 bp, Zea mays
tgacacaaacgaacaaggcct

SEQ ID NO: 4364 - DNA, 21 bp, Zea mays
gtacctcggcgccataggcta

SEQ ID NO: 4365 - DNA, 21 bp, Zea mays
aaacccgtcggttgtcagccg

SEQ ID NO: 4366 - DNA, 21 bp, Zea mays
caataactacggaactcctat

SEQ ID NO: 4367 - DNA, 21 bp, Zea mays
cccgtcgagcaactcagcaag

SEQ ID NO: 4368 - DNA, 21 bp, Zea mays
cctcatttttgtgaggggctg

SEQ ID NO: 4369 - DNA, 21 bp, Zea mays
cctgtagcgatttagagcgac

SEQ ID NO: 4370 - DNA, 21 bp, Zea mays
agctttctttgccgagtgcca

SEQ ID NO: 4371 - DNA, 21 bp, Zea mays
ctttgccgagtgccacgcaaa

SEQ ID NO: 4372 - DNA, 21 bp, Zea mays
agctgtgatgatggaagcatc

SEQ ID NO: 4373 - DNA, 21 bp, Zea mays
cctggtcaccaaatcagccca

SEQ ID NO: 4374 - DNA, 21 bp, Zea mays
catgtccatcaacggtcacat

SEQ ID NO: 4375 - DNA, 21 bp, Zea mays
cctacacctctcaagtcattt

SEQ ID NO: 4376 - DNA, 21 bp, Zea mays
aaacttctttgccgagtgcct

SEQ ID NO: 4377 - DNA, 21 bp, Zea mays
tcagacactcggcaaagacgt

SEQ ID NO: 4378 - DNA, 21 bp, Zea mays
gacgtctttgccgagtgtctg

SEQ ID NO: 4379 - DNA, 21 bp, Zea mays
gagtacgaccgggcgtggacg

SEQ ID NO: 4380 - DNA, 21 bp, Zea mays
ccgagagcaggactttgccga

SEQ ID NO: 4381 - DNA, 21 bp, Zea mays
acggctcccaaactagcccta

SEQ ID NO: 4382 - DNA, 21 bp, Zea mays
tgggtggcactcggcaaagaa

SEQ ID NO: 4383 - DNA, 21 bp, Zea mays
cggggacactcggcaaaggct

SEQ ID NO: 4384 - DNA, 21 bp, Zea mays
cagccgtcggacataagctta

SEQ ID NO: 4385 - DNA, 21 bp, Zea mays
atcgtggaatcttggtccgac

SEQ ID NO: 4386 - DNA, 21 bp, Zea mays
gcggcctgtgatgaccccaac

SEQ ID NO: 4387 - DNA, 21 bp, Zea mays
ggctggtcgtctattcttctg

SEQ ID NO: 4388 - DNA, 21 bp, Zea mays
tctccgttgcaacgcacagac

SEQ ID NO: 4389 - DNA, 21 bp, Zea mays
cacggtctccgtcgatgaggt

SEQ ID NO: 4390 - DNA, 21 bp, Zea mays
aatggtccgccgaaatccggc

SEQ ID NO: 4391 - DNA, 21 bp, Zea mays
agccccagcgagcatcatcgc

SEQ ID NO: 4392 - DNA, 21 bp, Zea mays
tcaagtcattcaggcttacac

SEQ ID NO: 4393 - DNA, 21 bp, Zea mays
gacgtgaccgccagagtctcc

SEQ ID NO: 4394 - DNA, 21 bp, Zea mays
tgccccacgtctgttagcgca

SEQ ID NO: 4395 - DNA, 21 bp, Zea mays
ccaaacactcggcaaagtctc

SEQ ID NO: 4396 - DNA, 21 bp, Zea mays
ggtgctaagcccgtcccacgc

SEQ ID NO: 4397 - DNA, 21 bp, Zea mays
ttcaaggaggcctgggacgcc

SEQ ID NO: 4398 - DNA, 21 bp, Zea mays
gtgtcacgatgcccgatcttc

SEQ ID NO: 4399 - DNA, 21 bp, Zea mays
tctcggcgccaagatctatgg

SEQ ID NO: 4400 - DNA, 21 bp, Zea mays
ctcgacgccatagatcttggc

SEQ ID NO: 4401 - DNA, 21 bp, Zea mays
tggtcccgcttctgccgcttg

SEQ ID NO: 4402 - DNA, 21 bp, Zea mays
gtgcaatagccactgcgcgag

SEQ ID NO: 4403 - DNA, 21 bp, Zea mays
gataaagtctttgccgagtgt

SEQ ID NO: 4404 - DNA, 21 bp, Zea mays
ggccacaccgcacacaaagtc

SEQ ID NO: 4405 - DNA, 21 bp, Zea mays
cagcgatccaaagtccaagca

SEQ ID NO: 4406 - DNA, 21 bp, Zea mays
aacctcggcgccataggctgt

SEQ ID NO: 4407 - DNA, 21 bp, Zea mays
taggctcccaaactagcccta

SEQ ID NO: 4408 - DNA, 21 bp, Zea mays
atctctggtcaccaaatcagc

SEQ ID NO: 4409 - DNA, 21 bp, Zea mays
gtaataagatttccgctgcaa

SEQ ID NO: 4410 - DNA, 21 bp, Zea mays
cgaagaacgtgggtacccacg

SEQ ID NO: 4411 - DNA, 21 bp, Zea mays
ggtacagagtcagggtcaagg

SEQ ID NO: 4412 - DNA, 21 bp, Zea mays
cagacggctgcaaactagaat

SEQ ID NO: 4413 - DNA, 21 bp, Zea mays
aacctacaggtgtggtcaatc

SEQ ID NO: 4414 - DNA, 21 bp, Zea mays
tcagacactcggcaaagaagc

SEQ ID NO: 4415 - DNA, 21 bp, Zea mays
gatttcggcgccataggctgt

SEQ ID NO: 4416 - DNA, 21 bp, Zea mays
ggcttctttgccgagtgtctg

SEQ ID NO: 4417 - DNA, 21 bp, Zea mays
atactctttgtcgagtgccag

SEQ ID NO: 4418 - DNA, 21 bp, Zea mays
gtagggcactcggcaaagaaa

SEQ ID NO: 4419 - DNA, 21 bp, Zea mays
gagctcgcccagcttcgtcgt

SEQ ID NO: 4420 - DNA, 21 bp, Zea mays
cctttctcctcttcggccttc

SEQ ID NO: 4421 - DNA, 21 bp, Zea mays
aagcaatttgtcgagcgcttg

SEQ ID NO: 4422 - DNA, 21 bp, Zea mays
tgaaccgcctgtgatgtaaaa

SEQ ID NO: 4423 - DNA, 21 bp, Zea mays
acgtttggtttctagggacta

SEQ ID NO: 4424 - DNA, 21 bp, Zea mays
gattgctggcactcggcaaag

SEQ ID NO: 4425 - DNA, 21 bp, Zea mays
cgctcgttggcttacgtcacg

SEQ ID NO: 4426 - DNA, 21 bp, Zea mays
gctaacttgccacactttgcc

SEQ ID NO: 4427 - DNA, 21 bp, Zea mays
acgcagtcatcccgagggagt

SEQ ID NO: 4428 - DNA, 21 bp, Zea mays
aatctctttgccgagtgtcac

SEQ ID NO: 4429 - DNA, 21 bp, Zea mays
ggcaaatgtggcaactgaggt

SEQ ID NO: 4430 - DNA, 21 bp, Zea mays
tggaggagtaggcaactcttc

SEQ ID NO: 4431 - DNA, 21 bp, Zea mays
cggtagaaacgaacaaggcct

SEQ ID NO: 4432 - DNA, 21 bp, Zea mays
gcggctttgccgagtgctttt

SEQ ID NO: 4433 - DNA, 21 bp, Zea mays
tccgtccactctgtcgccgtc

SEQ ID NO: 4434 - DNA, 21 bp, Zea mays
ccggacactcggcaaagaagc

SEQ ID NO: 4435 - DNA, 21 bp, Zea mays
ggagccgcatgcggagtgctg

SEQ ID NO: 4436 - DNA, 21 bp, Zea mays
agctctttgccgagtgctttt

SEQ ID NO: 4437 - DNA, 21 bp, Zea mays
ctgtagggcgctttgtcgagt

SEQ ID NO: 4438 - DNA, 21 bp, Zea mays
agaacctcccctcttagccac

SEQ ID NO: 4439 - DNA, 21 bp, Zea mays
gagagtctttgccgagagcca

SEQ ID NO: 4440 - DNA, 21 bp, Zea mays
gacgtctttgccgagagcctt

SEQ ID NO: 4441 - DNA, 21 bp, Zea mays
tctcggcaaagacgtctttgt

SEQ ID NO: 4442 - DNA, 21 bp, Zea mays
atagacgtctggacctggtcc

SEQ ID NO: 4443 - DNA, 21 bp, Zea mays
gaccgcctctaggaagttagc

SEQ ID NO: 4444 - DNA, 21 bp, Zea mays
ttacaaccttagccacgccga

SEQ ID NO: 4445 - DNA, 21 bp, Zea mays
aagtcaacgcacgcgatgatt

SEQ ID NO: 4446 - DNA, 21 bp, Zea mays
ggcgctttgccgagtgctttt

SEQ ID NO: 4447 - DNA, 21 bp, Zea mays
atccggctttgccgagtgccg

SEQ ID NO: 4448 - DNA, 21 bp, Zea mays
gcgtacttactcctggcagct

SEQ ID NO: 4449 - DNA, 21 bp, Zea mays
tccccaaccaaacacatccta

SEQ ID NO: 4450 - DNA, 21 bp, Zea mays
ccaaagtctttgccgagtgtc

SEQ ID NO: 4451 - DNA, 21 bp, Zea mays
taggaggcactcggcaaaaca

SEQ ID NO: 4452 - DNA, 21 bp, Zea mays
tggtgacactcggcaaaggct

SEQ ID NO: 4453 - DNA, 21 bp, Zea mays
ggcgcagtcacgactcgccta

SEQ ID NO: 4454 - DNA, 21 bp, Zea mays
aacttaggccttgttcgtttc

SEQ ID NO: 4455 - DNA, 21 bp, Zea mays
tagcgggttctttgccgagtg

SEQ ID NO: 4456 - DNA, 21 bp, Zea mays
atggctgtcagtatagccgtc

SEQ ID NO: 4457 - DNA, 21 bp, Zea mays
aatatggctgctcaagtgctt

SEQ ID NO: 4458 - DNA, 21 bp, Zea mays
cccagagtagtcgcccgaggc

SEQ ID NO: 4459 - DNA, 21 bp, Zea mays
gctgggacgacggtcgttgct

SEQ ID NO: 4460 - DNA, 21 bp, Zea mays
agtcctacgtggccgcatgcg

SEQ ID NO: 4461 - DNA, 21 bp, Zea mays
tctgaaagccgtcggacataa

SEQ ID NO: 4462 - DNA, 21 bp, Zea mays
tggcttaggccttgttcgttt

SEQ ID NO: 4463 - DNA, 21 bp, Zea mays
gccattcctgccgctgtaggt

SEQ ID NO: 4464 - DNA, 21 bp, Zea mays
tcatgcgccatagatcttggc

SEQ ID NO: 4465 - DNA, 21 bp, Zea mays
ccttactcatgcgcacccgag

SEQ ID NO: 4466 - DNA, 21 bp, Zea mays
gcaaaatgtggcaactgaggt

SEQ ID NO: 4467 - DNA, 21 bp, Zea mays
gtcacggcggcactcggcaaa

SEQ ID NO: 4468 - DNA, 21 bp, Zea mays
cgctaacttcctagaggcggc

SEQ ID NO: 4469 - DNA, 21 bp, Zea mays
ggccgcctctaggaagttagc

SEQ ID NO: 4470 - DNA, 21 bp, Zea mays
ataggttctttgccgagtgcg

SEQ ID NO: 4471 - DNA, 21 bp, Zea mays
ccagaacaaccatgacaccgc

SEQ ID NO: 4472 - DNA, 21 bp, Zea mays
cacaaaagctaccccgacgat

SEQ ID NO: 4473 - DNA, 21 bp, Zea mays
tccattatgtccgacggctgt

SEQ ID NO: 4474 - DNA, 21 bp, Zea mays
cagcagaaacgaacaaggcct

SEQ ID NO: 4475 - DNA, 21 bp, Zea mays
ttccaagtcctccgggctcag

SEQ ID NO: 4476 - DNA, 21 bp, Zea mays
gatgacactcggcaaagaagc

SEQ ID NO: 4477 - DNA, 21 bp, Zea mays
gcgccgagctaagggtccaaa

SEQ ID NO: 4478 - DNA, 21 bp, Zea mays
tgggacactcggcaaagaagc

SEQ ID NO: 4479 - DNA, 21 bp, Zea mays
accagctggcactcggcaaag

SEQ ID NO: 4480 - DNA, 21 bp, Zea mays
aagattatgtccgacggtctg

SEQ ID NO: 4481 - DNA, 21 bp, Zea mays
tcaggcgagtcgtgactgcgt

SEQ ID NO: 4482 - DNA, 21 bp, Zea mays
aatcatccaaaagactatcac

SEQ ID NO: 4483 - DNA, 21 bp, Zea mays
ccgctgtccgatgactgctcg

SEQ ID NO: 4484 - DNA, 21 bp, Zea mays
caacactcggcaaagaaggct

SEQ ID NO: 4485 - DNA, 21 bp, Zea mays
aggaatggattggttgaccaa

SEQ ID NO: 4486 - DNA, 21 bp, Zea mays
ggatcactcctgagctgagct

SEQ ID NO: 4487 - DNA, 21 bp, Zea mays
ttatcgttgccgagccacatc

SEQ ID NO: 4488 - DNA, 21 bp, Zea mays
cacgtggaccaatcagatcgc

SEQ ID NO: 4489 - DNA, 21 bp, Zea mays
cgtgccgtcgcaacgcacggg

SEQ ID NO: 4490 - DNA, 21 bp, Zea mays
tcacgctgctagcttcgtctt

SEQ ID NO: 4491 - DNA, 21 bp, Zea mays
ctaactttctacggcctcctc

SEQ ID NO: 4492 - DNA, 21 bp, Zea mays
cgggcggtctgcttcacacgg

SEQ ID NO: 4493 - DNA, 21 bp, Zea mays
caggaaagccgtcggacataa

SEQ ID NO: 4494 - DNA, 21 bp, Zea mays
tgggagcctggctctggagat

SEQ ID NO: 4495 - DNA, 21 bp, Zea mays
gatgcaaacgaacaaggcctt

SEQ ID NO: 4496 - DNA, 21 bp, Zea mays
tcccaccagtcatagacacgg

SEQ ID NO: 4497 - DNA, 21 bp, Zea mays
ctgaggcgtgacttaggcact

SEQ ID NO: 4498 - DNA, 21 bp, Zea mays
tgacactcggcaaagaaggct

SEQ ID NO: 4499 - DNA, 21 bp, Zea mays
gactgctcgtgatctgctgac

SEQ ID NO: 4500 - DNA, 21 bp, Zea mays
cacagtccagccgcacgtgga

SEQ ID NO: 4501 - DNA, 21 bp, Zea mays
acaaagtgtggcaactgaggt

SEQ ID NO: 4502 - DNA, 21 bp, Zea mays
tcacctctccaacaaagccat

SEQ ID NO: 4503 - DNA, 21 bp, Zea mays
ccgtgcgttgcgacggctcac

SEQ ID NO: 4504 - DNA, 21 bp, Zea mays
atccacttatatgggcttttg

SEQ ID NO: 4505 - DNA, 21 bp, Zea mays
ttcctaggggctacagtcagc

SEQ ID NO: 4506 - DNA, 21 bp, Zea mays
tggctctttgccgagtgtttt

SEQ ID NO: 4507 - DNA, 21 bp, Zea mays
atttcagcagcaggcaagcag

SEQ ID NO: 4508 - DNA, 21 bp, Zea mays
tctggcgacaacccactaatc

SEQ ID NO: 4509 - DNA, 21 bp, Zea mays
gttgataagcactggcgaagt

SEQ ID NO: 4510 - DNA, 21 bp, Zea mays
cgcgagcacattgtacggaag

SEQ ID NO: 4511 - DNA, 21 bp, Zea mays
aagccggcatgacgtgtctgt

SEQ ID NO: 4512 - DNA, 21 bp, Zea mays
ccatttaggccttgttcggtt

SEQ ID NO: 4513 - DNA, 21 bp, Zea mays
gccaccacctgtttttgacac

SEQ ID NO: 4514 - DNA, 21 bp, Zea mays
ttcagaacgtgggtacccacg

SEQ ID NO: 4515 - DNA, 21 bp, Zea mays
cccctcggcaaagtctttgcc

SEQ ID NO: 4516 - DNA, 21 bp, Zea mays
attggtttatggagtcactct

SEQ ID NO: 4517 - DNA, 21 bp, Zea mays
agactctttgccgagtgtctg

SEQ ID NO: 4518 - DNA, 21 bp, Zea mays
gacgttgctggagacagccta

SEQ ID NO: 4519 - DNA, 21 bp, Zea mays
cattcaaccaaacgcaccctt

SEQ ID NO: 4520 - DNA, 21 bp, Zea mays
ggtagctcggcgccaagatct

SEQ ID NO: 4521 - DNA, 21 bp, Zea mays
ctcagacgctcacaagttcat

SEQ ID NO: 4522 - DNA, 21 bp, Zea mays
tgacactcggcaaagtctttg

SEQ ID NO: 4523 - DNA, 21 bp, Zea mays
cctccacgtgttcgatcgcgt

SEQ ID NO: 4524 - DNA, 21 bp, Zea mays
gtttgtggctaactgtgtcac

SEQ ID NO: 4525 - DNA, 21 bp, Zea mays
agactctttgccgagtgtcac

SEQ ID NO: 4526 - DNA, 21 bp, Zea mays
ggccactcacaacagggtccc

SEQ ID NO: 4527 - DNA, 21 bp, Zea mays
caggttctttgccgagtgctt

SEQ ID NO: 4528 - DNA, 21 bp, Zea mays
catatcaagcgtttgactttc

SEQ ID NO: 4529 - DNA, 21 bp, Zea mays
ttttggggggggggggggggg

SEQ ID NO: 4530 - DNA, 21 bp, Zea mays
gcactgcactcagtcgtgttt

SEQ ID NO: 4531 - DNA, 21 bp, Zea mays
atcagcgtcatagatcttggc

SEQ ID NO: 4532 - DNA, 21 bp, Zea mays
gctagctcggcgccaagatct

SEQ ID NO: 4533 - DNA, 21 bp, Zea mays
ggcaaagttgagtcggacttg

SEQ ID NO: 4534 - DNA, 21 bp, Zea mays
cgaatttaggggacgctgctg

SEQ ID NO: 4535 - DNA, 21 bp, Zea mays
tctgtctgtctgtctctctct

SEQ ID NO: 4536 - DNA, 21 bp, Zea mays
ggtaggcgccaagatctatgg

SEQ ID NO: 4537 - DNA, 21 bp, Zea mays
ttaggcgccatagatcttggc

SEQ ID NO: 4538 - DNA, 21 bp, Zea mays
atcacacttcgccagaccgcc

SEQ ID NO: 4539 - DNA, 21 bp, Zea mays
gccgcactcggcaaagtcctg

SEQ ID NO: 4540 - DNA, 21 bp, Zea mays
cgcgggcactcggcaaagaaa

SEQ ID NO: 4541 - DNA, 21 bp, Zea mays
agcttggcgccacagatcttg

SEQ ID NO: 4542 - DNA, 21 bp, Zea mays
tggcaccaagatctgtggcac

SEQ ID NO: 4543 - DNA, 21 bp, Zea mays
cccgccgtatgaagtcgttgc

SEQ ID NO: 4544 - DNA, 21 bp, Zea mays
gcgcttatgtccgacggcccc

SEQ ID NO: 4545 - DNA, 21 bp, Zea mays
cactattaggcacggcactat

SEQ ID NO: 4546 - DNA, 21 bp, Zea mays
cgattaggtccttgtcgagca

SEQ ID NO: 4547 - DNA, 21 bp, Zea mays
gttatggattggtgggtcgga

SEQ ID NO: 4548 - DNA, 21 bp, Zea mays
gcatgtgggcccaataacttg

SEQ ID NO: 4549 - DNA, 21 bp, Zea mays
cgcttcccagacacatgccag

SEQ ID NO: 4550 - DNA, 21 bp, Zea mays
gtacgtgggcccaataacttg

SEQ ID NO: 4551 - DNA, 21 bp, Zea mays
cgtcttatgtccgacggcccc

SEQ ID NO: 4552 - DNA, 21 bp, Zea mays
tttttacgctccaccccgatt

SEQ ID NO: 4553 - DNA, 21 bp, Zea mays
tctaccgagatcctgattgga

SEQ ID NO: 4554 - DNA, 21 bp, Zea mays
gggatagccgccctacgtctg

SEQ ID NO: 4555 - DNA, 21 bp, Zea mays
tgacaggaaccagctcagctc

SEQ ID NO: 4556 - DNA, 21 bp, Zea mays
acatgtggacccaataacttg

SEQ ID NO: 4557 - DNA, 21 bp, Zea mays
agccttatgtccgacggcccc

SEQ ID NO: 4558 - DNA, 21 bp, Zea mays
agtccgtcgctgaggacgcct

SEQ ID NO: 4559 - DNA, 21 bp, Zea mays
tctcgttgcaacgcacgggca

SEQ ID NO: 4560 - DNA, 21 bp, Zea mays
gagagccgcactcggtaaagt

SEQ ID NO: 4561 - DNA, 21 bp, Zea mays
tcgtccaccaactgcatcttg

SEQ ID NO: 4562 - DNA, 21 bp, Zea mays
tgctcctggtcctcctcttgg

SEQ ID NO: 4563 - DNA, 21 bp, Zea mays
ttcatgggcccacatgtcagg

SEQ ID NO: 4564 - DNA, 21 bp, Zea mays
ggccggtctacggtggcagag

SEQ ID NO: 4565 - DNA, 21 bp, Zea mays
gactccccttaggccctgttc

SEQ ID NO: 4566 - DNA, 21 bp, Zea mays
gtccacgcagcaaaccgaggc

SEQ ID NO: 4567 - DNA, 21 bp, Zea mays
ctccatcccactcgaccgtcc

SEQ ID NO: 4568 - DNA, 21 bp, Zea mays
tggtcttcctcgtggacagct

SEQ ID NO: 4569 - DNA, 21 bp, Zea mays
tcggtccctttgccgagtgct

SEQ ID NO: 4570 - DNA, 21 bp, Zea mays
accgagaggcacccgcaccag

SEQ ID NO: 4571 - DNA, 21 bp, Zea mays
gtcacgatgcccgatcttcac

SEQ ID NO: 4572 - DNA, 21 bp, Zea mays
ttctttgccgagtgcccgata

SEQ ID NO: 4573 - DNA, 21 bp, Zea mays
agaagaccgtcggacataagc

SEQ ID NO: 4574 - DNA, 21 bp, Zea mays
gttccgccacagctggtatcg

SEQ ID NO: 4575 - DNA, 21 bp, Zea mays
atattctttgtcgagtgtcac

SEQ ID NO: 4576 - DNA, 21 bp, Zea mays
ctgtcctgtcattgcaaccaa

SEQ ID NO: 4577 - DNA, 21 bp, Zea mays
ctggccgccatcgctgcaacg

SEQ ID NO: 4578 - DNA, 21 bp, Zea mays
tacatcctcgtgccggagcaa

SEQ ID NO: 4579 - DNA, 21 bp, Zea mays
ccacagagacgtgatccaagc

SEQ ID NO: 4580 - DNA, 21 bp, Zea mays
gtaagggcttgtttggtttgt

SEQ ID NO: 4581 - DNA, 21 bp, Zea mays
cgcagccaggcccgtccgaga

SEQ ID NO: 4582 - DNA, 21 bp, Zea mays
tcgcctttgccgagtgctagc

SEQ ID NO: 4583 - DNA, 21 bp, Zea mays
gcgactttgccgagtgctagc

SEQ ID NO: 4584 - DNA, 21 bp, Zea mays
gcaacaacgtccaaatcccag

SEQ ID NO: 4585 - DNA, 21 bp, Zea mays
gcttcgccacccagcagcttc

SEQ ID NO: 4586 - DNA, 21 bp, Zea mays
tcctcaacgcgcccagcaacg

SEQ ID NO: 4587 - DNA, 21 bp, Zea mays
attggactcaggacggacgac

SEQ ID NO: 4588 - DNA, 21 bp, Zea mays
ctcagtgcccgtgcgttgcaa

SEQ ID NO: 4589 - DNA, 21 bp, Zea mays
agcctctttgccgagtgcctg

SEQ ID NO: 4590 - DNA, 21 bp, Zea mays
cccagcccgaaggtcgtttgc

SEQ ID NO: 4591 - DNA, 21 bp, Zea mays
tttcgggtcgtgctcgtgctg

SEQ ID NO: 4592 - DNA, 21 bp, Zea mays
agagcagccaggtgaccaacc

SEQ ID NO: 4593 - DNA, 21 bp, Zea mays
gatccggcactcggcaaagaa

SEQ ID NO: 4594 - DNA, 21 bp, Zea mays
catctggcactcggcaaagag

SEQ ID NO: 4595 - DNA, 21 bp, Zea mays
cgttgggctagcccgagcacg

SEQ ID NO: 4596 - DNA, 21 bp, Zea mays
gatgtgaggtgcgtgcctgca

SEQ ID NO: 4597 - DNA, 21 bp, Zea mays
catctcccgcagcggttcccc

SEQ ID NO: 4598 - DNA, 21 bp, Zea mays
gctgacccgcaaccaaacgca

SEQ ID NO: 4599 - DNA, 21 bp, Zea mays
gggcctgtgacgcacgagcac

SEQ ID NO: 4600 - DNA, 21 bp, Zea mays
agcggcgccacctcgagttcg

SEQ ID NO: 4601 - DNA, 21 bp, Zea mays
tcgagcagacgtcgggctcct

SEQ ID NO: 4602 - DNA, 21 bp, Zea mays
aacacggcactcggcaaagaa

SEQ ID NO: 4603 - DNA, 21 bp, Zea mays
actagccagttgctcgtgctt

SEQ ID NO: 4604 - DNA, 21 bp, Zea mays
gacctggagcactcctggaac

SEQ ID NO: 4605 - DNA, 21 bp, Zea mays
ctcgtgcactcggcaaagaaa

SEQ ID NO: 4606 - DNA, 21 bp, Zea mays
gtcctcgaccacttcaccgga

SEQ ID NO: 4607 - DNA, 21 bp, Zea mays
gaacctagccgtggaatcgcc

SEQ ID NO: 4608 - DNA, 21 bp, Zea mays
cagatctttgccgagtgcccg

SEQ ID NO: 4609 - DNA, 21 bp, Zea mays
agcagctcggcctcagcctcg

SEQ ID NO: 4610 - DNA, 21 bp, Zea mays
gaggggcctaagcgttttgct

SEQ ID NO: 4611 - DNA, 21 bp, Zea mays
aaagcttctttgccgagtgtc

SEQ ID NO: 4612 - DNA, 21 bp, Zea mays
ttttgtgcgcactttgtcctc

SEQ ID NO: 4613 - DNA, 21 bp, Zea mays
gcccgtgaaaccgcgagggtc

SEQ ID NO: 4614 - DNA, 21 bp, Zea mays
ccaccgccgccaaatcgctca

SEQ ID NO: 4615 - DNA, 21 bp, Zea mays
cgcctgaagccgcaccgctgc

SEQ ID NO: 4616 - DNA, 21 bp, Zea mays
catttggcactcggcaaagag

SEQ ID NO: 4617 - DNA, 21 bp, Zea mays
tgctgagcaacccagcgaggc

SEQ ID NO: 4618 - DNA, 21 bp, Zea mays
aacttctttgccgagtgcctg

SEQ ID NO: 4619 - DNA, 21 bp, Zea mays
gcctaccaccctgccaccggg

SEQ ID NO: 4620 - DNA, 21 bp, Zea mays
tcggtcaagcagcaggtggtg

SEQ ID NO: 4621 - DNA, 21 bp, Zea mays
gccgtcggacataaccgtatg

SEQ ID NO: 4622 - DNA, 21 bp, Zea mays
ccggtggcaagggtcagtaca

SEQ ID NO: 4623 - DNA, 21 bp, Zea mays
accaagaggcacccgcaccag

SEQ ID NO: 4624 - DNA, 21 bp, Zea mays
gctggcggctcagaccgtgga

SEQ ID NO: 4625 - DNA, 21 bp, Zea mays
gccggaatcgctcggtccacg

SEQ ID NO: 4626 - DNA, 21 bp, Zea mays
gacttggagcactcctggaac

SEQ ID NO: 4627 - DNA, 21 bp, Zea mays
gggcgcgtcgtcgtcgtcgtc

SEQ ID NO: 4628 - DNA, 21 bp, Zea mays
ttgcacctaatggttgtttgc

SEQ ID NO: 4629 - DNA, 21 bp, Zea mays
tgctcccgcacatgcagcgtt

SEQ ID NO: 4630 - DNA, 21 bp, Zea mays
ctcgcctccctctcgcccgcc

SEQ ID NO: 4631 - DNA, 21 bp, Zea mays
gtatcgcctcgctctcgcccg

SEQ ID NO: 4632 - DNA, 21 bp, Zea mays
tcctcctccgacgactcctca

SEQ ID NO: 4633 - DNA, 21 bp, Zea mays
gtagacgcggcccgatcttcc

SEQ ID NO: 4634 - DNA, 21 bp, Zea mays
aaatcgcgctcacccagaggg

SEQ ID NO: 4635 - DNA, 21 bp, Zea mays
tgggtgcggtcatccaatcag

SEQ ID NO: 4636 - DNA, 21 bp, Zea mays
ctcgcctccactctcgcccct

SEQ ID NO: 4637 - DNA, 21 bp, Zea mays
tatcttgcacgcggaccgagg

SEQ ID NO: 4638 - DNA, 21 bp, Zea mays
gcgtccgagcaaaagtcgcct

SEQ ID NO: 4639 - DNA, 21 bp, Zea mays
actaagggcctgtttggttca

SEQ ID NO: 4640 - DNA, 21 bp, Zea mays
aagcaaaagcctgcctagtcc

SEQ ID NO: 4641 - DNA, 21 bp, Zea mays
tagcgaagagtcggggcttgt

SEQ ID NO: 4642 - DNA, 21 bp, Zea mays
tttgccgtgtgtctcagacac

SEQ ID NO: 4643 - DNA, 21 bp, Zea mays
ctagagatgcgaccaatctgc

SEQ ID NO: 4644 - DNA, 21 bp, Zea mays
cacagcacagtgtttagggtg

SEQ ID NO: 4645 - DNA, 21 bp, Zea mays
tctcagccacccgccaatgat

SEQ ID NO: 4646 - DNA, 21 bp, Zea mays
gcccaaccagcaccccgctgg

SEQ ID NO: 4647 - DNA, 21 bp, Zea mays
gcaactcgcagcctgcgcgcc

SEQ ID NO: 4648 - DNA, 21 bp, Zea mays
gccgccccagccaaactcccc

SEQ ID NO: 4649 - DNA, 21 bp, Zea mays
cgacggcatcaacctatgtcc

SEQ ID NO: 4650 - DNA, 21 bp, Zea mays
atctgcagggtggccctggcg

SEQ ID NO: 4651 - DNA, 21 bp, Zea mays
aggcggcacatcgcttgtcag

SEQ ID NO: 4652 - DNA, 21 bp, Zea mays
ctggtcgccctgcactcagtc

SEQ ID NO: 4653 - DNA, 21 bp, Zea mays
ttcgctgcggctttaatccag

SEQ ID NO: 4654 - DNA, 21 bp, Zea mays
cgctgagcaacccagcgaggc

SEQ ID NO: 4655 - DNA, 21 bp, Zea mays
cgccgcgccctcctactcatc

SEQ ID NO: 4656 - DNA, 21 bp, Zea mays
ctttttgccgagtgtcaaaaa

SEQ ID NO: 4657 - DNA, 21 bp, Zea mays
ataggcgtcagcgcacatgag

SEQ ID NO: 4658 - DNA, 21 bp, Zea mays
cctggtcctctcctgcggaag

SEQ ID NO: 4659 - DNA, 21 bp, Zea mays
aggtgcacgcgctactttatg

SEQ ID NO: 4660 - DNA, 21 bp, Zea mays
tcgctggctcccatggtcaag

SEQ ID NO: 4661 - DNA, 21 bp, Zea mays
atcgagttgcaaccgggaacg

SEQ ID NO: 4662 - DNA, 21 bp, Zea mays
ttctttgccgagtgtcaaaaa

SEQ ID NO: 4663 - DNA, 21 bp, Zea mays
ccaccgcacgtcgaggtcggg

SEQ ID NO: 4664 - DNA, 21 bp, Zea mays
agccacaccaggaggacgacg

SEQ ID NO: 4665 - DNA, 21 bp, Zea mays
catccaacggcccacaaccct

SEQ ID NO: 4666 - DNA, 21 bp, Zea mays
cggctggcactcggcaaagag

SEQ ID NO: 4667 - DNA, 21 bp, Zea mays
tcatttacagccgctcgtcca

SEQ ID NO: 4668 - DNA, 21 bp, Zea mays
cataacttgtcacactttgcc

SEQ ID NO: 4669 - DNA, 21 bp, Zea mays
aggacgacggtgacgaccatg

SEQ ID NO: 4670 - DNA, 21 bp, Zea mays
gctcggcgccaagatctgtgg

SEQ ID NO: 4671 - DNA, 21 bp, Zea mays
tcacaaggtcctgcgaagcct

SEQ ID NO: 4672 - DNA, 21 bp, Zea mays
ccaccgccgcaagccgcgtcg

SEQ ID NO: 4673 - DNA, 21 bp, Zea mays
gacttctttgccgagtgcccg

SEQ ID NO: 4674 - DNA, 21 bp, Zea mays
gcggccctgcgtcgaggactc

SEQ ID NO: 4675 - DNA, 21 bp, Zea mays
gtgatctgggtcgcgttcggc

SEQ ID NO: 4676 - DNA, 21 bp, Zea mays
tgctcagtccacgatacgtgg

SEQ ID NO: 4677 - DNA, 21 bp, Zea mays
cgggctcgacagcgtccgcgg

SEQ ID NO: 4678 - DNA, 21 bp, Zea mays
actcaatcccacccaatccac

SEQ ID NO: 4679 - DNA, 21 bp, Zea mays
attacttctttgccgagtgtc

SEQ ID NO: 4680 - DNA, 21 bp, Zea mays
aaccctcccaacagcagtagg

SEQ ID NO: 4681 - DNA, 21 bp, Zea mays
ggggcttatcggcggcagtag

SEQ ID NO: 4682 - DNA, 21 bp, Zea mays
gaccgcgtcttcgccctacag

SEQ ID NO: 4683 - DNA, 21 bp, Zea mays
tgactcaggcgctctggctgg

SEQ ID NO: 4684 - DNA, 21 bp, Zea mays
gtggaactcagggtggacagc

SEQ ID NO: 4685 - DNA, 21 bp, Zea mays
gacatcgctcgctcgaacatc

SEQ ID NO: 4686 - DNA, 21 bp, Zea mays
cccagcaaggcactctatacc

SEQ ID NO: 4687 - DNA, 21 bp, Zea mays
gacacaaacgaacaaggcctg

SEQ ID NO: 4688 - DNA, 21 bp, Zea mays
tcatccgagcaaaagtcgcct

SEQ ID NO: 4689 - DNA, 21 bp, Zea mays
cttggcctaccaccctgccac

SEQ ID NO: 4690 - DNA, 21 bp, Zea mays
cctaccgcctccgggattgga

SEQ ID NO: 4691 - DNA, 21 bp, Zea mays
agtctcacccttcgcttcacc

SEQ ID NO: 4692 - DNA, 21 bp, Zea mays
ctcggcgccgtagatcttggc

SEQ ID NO: 4693 - DNA, 21 bp, Zea mays
gtcgaactggcagtcgccaag

SEQ ID NO: 4694 - DNA, 21 bp, Zea mays
tggtcgtgccgtgccaatttg

SEQ ID NO: 4695 - DNA, 21 bp, Zea mays
tccccgcgaacagttccgtca

SEQ ID NO: 4696 - DNA, 21 bp, Zea mays
tgtctatcacaggcggttctt

SEQ ID NO: 4697 - DNA, 21 bp, Zea mays
gaaggccgagcccaccggcac

SEQ ID NO: 4698 - DNA, 21 bp, Zea mays
ctcggcgccaagatctatggc

SEQ ID NO: 4699 - DNA, 21 bp, Zea mays
accacatccgacgacgacgcc

SEQ ID NO: 4700 - DNA, 21 bp, Zea mays
ttcggttcggttcctcggttc

SEQ ID NO: 4701 - DNA, 21 bp, Zea mays
gatcgggtctccgcctgagcg

SEQ ID NO: 4702 - DNA, 21 bp, Zea mays
ttcgggccgccggagcgtaat

SEQ ID NO: 4703 - DNA, 21 bp, Zea mays
caccttagggcttgttcggtt

SEQ ID NO: 4704 - DNA, 21 bp, Zea mays
ggaatggaacggctccgttct

SEQ ID NO: 4705 - DNA, 21 bp, Zea mays
gtgtagtgctaggcgtagaag

SEQ ID NO: 4706 - DNA, 21 bp, Zea mays
agccggtctacggtggcagag

SEQ ID NO: 4707 - DNA, 21 bp, Zea mays
gttgcaacgcacgggcactca

SEQ ID NO: 4708 - DNA, 21 bp, Zea mays
cttctccccgtagcctggctg

SEQ ID NO: 4709 - DNA, 21 bp, Zea mays
gctgtcttaatcgaccaacac

SEQ ID NO: 4710 - DNA, 21 bp, Zea mays
gtcctggcactcggcaaagag

SEQ ID NO: 4711 - DNA, 21 bp, Zea mays
ggccggcggcgcaccgaaggg

SEQ ID NO: 4712 - DNA, 21 bp, Zea mays
ccgcccgttggcttacgtcac

SEQ ID NO: 4713 - DNA, 21 bp, Zea mays
ctatccgaaccgcctgtgatg

SEQ ID NO: 4714 - DNA, 21 bp, Zea mays
tgactatcacaggcggttctt

SEQ ID NO: 4715 - DNA, 21 bp, Zea mays
gaccccaccggcccagagcct

SEQ ID NO: 4716 - DNA, 21 bp, Zea mays
gcaaatcacgccgccgtcctc

SEQ ID NO: 4717 - DNA, 21 bp, Zea mays
aaaaccgtcggacataaggaa

SEQ ID NO: 4718 - DNA, 21 bp, Zea mays
tccttctttgccgagtgcccg

SEQ ID NO: 4719 - DNA, 21 bp, Zea mays
tcgcctgtccaccctgctgac

SEQ ID NO: 4720 - DNA, 21 bp, Zea mays
tgagccgtcgcaacgcacggg

SEQ ID NO: 4721 - DNA, 21 bp, Zea mays
agagcttctttgccgagtgtc

SEQ ID NO: 4722 - DNA, 21 bp, Zea mays
agaaacccgcagtccaacagt

SEQ ID NO: 4723 - DNA, 21 bp, Zea mays
tcacactcggcaaagacttcg

SEQ ID NO: 4724 - DNA, 21 bp, Zea mays
ccgtgacactcggcaaaggct

SEQ ID NO: 4725 - DNA, 21 bp, Zea mays
aggcgcacgcgctactttatg

SEQ ID NO: 4726 - DNA, 21 bp, Zea mays
tctagtcaccaaatcagccct

SEQ ID NO: 4727 - DNA, 21 bp, Zea mays
atacttactcctggcagctct

SEQ ID NO: 4728 - DNA, 21 bp, Zea mays
taatccctcgcctacgcctcc

SEQ ID NO: 4729 - DNA, 21 bp, Zea mays
acgccgaggtaacacatagtg

SEQ ID NO: 4730 - DNA, 21 bp, Zea mays
cccaatccgacggaaacgaac

SEQ ID NO: 4731 - DNA, 21 bp, Zea mays
ggcgaactgtacatcggcaac

SEQ ID NO: 4732 - DNA, 21 bp, Zea mays
acgaccgtggactggcttctc

SEQ ID NO: 4733 - DNA, 21 bp, Zea mays
tactcggcgccataggctgtg

SEQ ID NO: 4734 - DNA, 21 bp, Zea mays
cggggctttgccgagtgcttt

SEQ ID NO: 4735 - DNA, 21 bp, Zea mays
gcgaccgtggactggcttctc

SEQ ID NO: 4736 - DNA, 21 bp, Zea mays
ctagtcgccctgcactcagtc

SEQ ID NO: 4737 - DNA, 21 bp, Zea mays
atgggtgcccgtgcgttgcaa

SEQ ID NO: 4738 - DNA, 21 bp, Zea mays
taggtgccgtttggttcgcga

SEQ ID NO: 4739 - DNA, 21 bp, Zea mays
cggttctttgccgagtgctcg

SEQ ID NO: 4740 - DNA, 21 bp, Zea mays
ttgattccgtagcaacgcacg

SEQ ID NO: 4741 - DNA, 21 bp, Zea mays
gtcaggccaacgtcgcacagg

SEQ ID NO: 4742 - DNA, 21 bp, Zea mays
tccatctttgccgagtgcccg

SEQ ID NO: 4743 - DNA, 21 bp, Zea mays
ccccgcatccaccgcaccacg

SEQ ID NO: 4744 - DNA, 21 bp, Zea mays
tacctgcgggtgggacctatc

SEQ ID NO: 4745 - DNA, 21 bp, Zea mays
ccccagaaaccaaacaccccc

SEQ ID NO: 4746 - DNA, 21 bp, Zea mays
acctcagcgccatagcctatg

SEQ ID NO: 4747 - DNA, 21 bp, Zea mays
ccaaatccatagactgtcgac

SEQ ID NO: 4748 - DNA, 21 bp, Zea mays
taatacatcacaggcggttcg

SEQ ID NO: 4749 - DNA, 21 bp, Zea mays
cgcatggcccaggcacgacac

SEQ ID NO: 4750 - DNA, 21 bp, Zea mays
cagcgccgccgtgagacatct

SEQ ID NO: 4751 - DNA, 21 bp, Zea mays
tgctgatcagccgtatcgcgg

SEQ ID NO: 4752 - DNA, 21 bp, Zea mays
cacgaggcagccgaagacccg

SEQ ID NO: 4753 - DNA, 21 bp, Zea mays
tatgcagtcttgtgcggagag

SEQ ID NO: 4754 - DNA, 21 bp, Zea mays
atcacgatgcccgatcttcac

SEQ ID NO: 4755 - DNA, 21 bp, Zea mays
aaattctttgccgagtgcccg

SEQ ID NO: 4756 - DNA, 21 bp, Zea mays
cctcggcgccacaggctatgg

SEQ ID NO: 4757 - DNA, 21 bp, Zea mays
ctagatttggcgtccgcatat

SEQ ID NO: 4758 - DNA, 21 bp, Zea mays
aatgttaagttcgacggtacc

SEQ ID NO: 4759 - DNA, 21 bp, Zea mays
tatgggccttacgtcaggctc

SEQ ID NO: 4760 - DNA, 21 bp, Zea mays
tgtcggcgtttcgaccccggg

SEQ ID NO: 4761 - DNA, 21 bp, Zea mays
tggatagggccaagaacgagg

SEQ ID NO: 4762 - DNA, 21 bp, Zea mays
gtcgcaaacagaagccgcagg

SEQ ID NO: 4763 - DNA, 21 bp, Zea mays
ttgtcgtgtcgtgccggcact

SEQ ID NO: 4764 - DNA, 21 bp, Zea mays
ggcgctcaatccactggaacc

SEQ ID NO: 4765 - DNA, 21 bp, Zea mays
tctaacttgtcacactttgcc

SEQ ID NO: 4766 - DNA, 21 bp, Zea mays
ttgagtgcccgtgcgttgcaa

SEQ ID NO: 4767 - DNA, 21 bp, Zea mays
gtgatctggcactcggcaaag

SEQ ID NO: 4768 - DNA, 21 bp, Zea mays
gtaggactgcttccagaggtc

SEQ ID NO: 4769 - DNA, 21 bp, Zea mays
atcgtacttttccggcaggtg

SEQ ID NO: 4770 - DNA, 21 bp, Zea mays
cgccacacgtcacaatgccag

SEQ ID NO: 4771 - DNA, 21 bp, Zea mays
tatgtcctcgtgccggagcaa

SEQ ID NO: 4772 - DNA, 21 bp, Zea mays
tttctccacagcctggctcgc

SEQ ID NO: 4773 - DNA, 21 bp, Zea mays
gtcgcatgtgctgtcacgttc

SEQ ID NO: 4774 - DNA, 21 bp, Zea mays
gatcctggcgctggacccagc

SEQ ID NO: 4775 - DNA, 21 bp, Zea mays
gctgtctgaggtctttgagac

SEQ ID NO: 4776 - DNA, 21 bp, Zea mays
tttagctcgcgagctggctcg

SEQ ID NO: 4777 - DNA, 21 bp, Zea mays
cactgtaacgcacggacactc

SEQ ID NO: 4778 - DNA, 21 bp, Zea mays
cgacgcctccctcagccggcg

SEQ ID NO: 4779 - DNA, 21 bp, Zea mays
cctgctggcttatgtcacggg

SEQ ID NO: 4780 - DNA, 21 bp, Zea mays
tgcctgaccggccgagcgcgg

SEQ ID NO: 4781 - DNA, 21 bp, Zea mays
cgtgcgcccgcaacaagtggg

SEQ ID NO: 4782 - DNA, 21 bp, Zea mays
cccgagctccgggagtcttcg

SEQ ID NO: 4783 - DNA, 21 bp, Zea mays
acttgtcaccaaatcagccct

SEQ ID NO: 4784 - DNA, 21 bp, Zea mays
tcggcgccatagcctatggcg

SEQ ID NO: 4785 - DNA, 21 bp, Zea mays
atcttctttgccgagtgttac

SEQ ID NO: 4786 - DNA, 21 bp, Zea mays
ttggtgttaccacggcttcac

SEQ ID NO: 4787 - DNA, 21 bp, Zea mays
gaagtctttgccgagtgtgac

SEQ ID NO: 4788 - DNA, 21 bp, Zea mays
tgggtgtccgtgcgttgcaac

SEQ ID NO: 4789 - DNA, 21 bp, Zea mays
atgaggggttttttgggctct

SEQ ID NO: 4790 - DNA, 21 bp, Zea mays
agggagacactcggcaaagag

SEQ ID NO: 4791 - DNA, 21 bp, Zea mays
gccttctttgccgagtgcccg

SEQ ID NO: 4792 - DNA, 21 bp, Zea mays
gattcctttgccgagtgccag

SEQ ID NO: 4793 - DNA, 21 bp, Zea mays
tgcgtggcactcggcaaagaa

SEQ ID NO: 4794 - DNA, 21 bp, Zea mays
tcctgacactcggcaaagcac

SEQ ID NO: 4795 - DNA, 21 bp, Zea mays
cagcactcggcaaagatggct

SEQ ID NO: 4796 - DNA, 21 bp, Zea mays
actacgcctcgcccgagccca

SEQ ID NO: 4797 - DNA, 21 bp, Zea mays
cgactcaggcgctctggctgg

SEQ ID NO: 4798 - DNA, 21 bp, Zea mays
gggttggctcggggagactct

SEQ ID NO: 4799 - DNA, 21 bp, Zea mays
cttaagggcctgtttggttca

SEQ ID NO: 4800 - DNA, 21 bp, Zea mays
ggtgtttggtttgcccctgct

SEQ ID NO: 4801 - DNA, 21 bp, Zea mays
ttgttcggttgctcaggaacg

SEQ ID NO: 4802 - DNA, 21 bp, Zea mays
cattgggtctccgcctgagcg

SEQ ID NO: 4803 - DNA, 21 bp, Zea mays
taaggcctgtttggtttgtgg

SEQ ID NO: 4804 - DNA, 21 bp, Zea mays
gagacaaacccatacccgcga

SEQ ID NO: 4805 - DNA, 21 bp, Zea mays
ctcgcaacatccgccgactcc

SEQ ID NO: 4806 - DNA, 21 bp, Zea mays
atgtgtggtaatggatcacga

SEQ ID NO: 4807 - DNA, 21 bp, Zea mays
cgttcgtggatggagcgattc

SEQ ID NO: 4808 - DNA, 21 bp, Zea mays
cgttccctcctcctggtggtg

SEQ ID NO: 4809 - DNA, 21 bp, Zea mays
ggggcttctttgccgagtgtc

SEQ ID NO: 4810 - DNA, 21 bp, Zea mays
gcgatctggcactcggcaaag

SEQ ID NO: 4811 - DNA, 21 bp, Zea mays
tgtatgcccgtgcgttgctac

SEQ ID NO: 4812 - DNA, 21 bp, Zea mays
ccacagtcgcgtgctgacgcg

SEQ ID NO: 4813 - DNA, 21 bp, Zea mays
cccagtcaccaaatcagccct

SEQ ID NO: 4814 - DNA, 21 bp, Zea mays
gcataggttctttgccgagtg

SEQ ID NO: 4815 - DNA, 21 bp, Zea mays
agcaactgcgcggacctgcca

SEQ ID NO: 4816 - DNA, 21 bp, Zea mays
tattagagcaactccaatagt

SEQ ID NO: 4817 - DNA, 21 bp, Zea mays
ccgtctgtgatgtaaaaagcc

SEQ ID NO: 4818 - DNA, 21 bp, Zea mays
gccccgactcatcctactttg

SEQ ID NO: 4819 - DNA, 21 bp, Zea mays
gtaccgccggtccagggattg

SEQ ID NO: 4820 - DNA, 21 bp, Zea mays
gtgcagccggactagcacaac

SEQ ID NO: 4821 - DNA, 21 bp, Zea mays
gtggcagccctgtagtcagcg

SEQ ID NO: 4822 - DNA, 21 bp, Zea mays
accctcgaccacttcaccgga

SEQ ID NO: 4823 - DNA, 21 bp, Zea mays
gctacgcagcacgacgacttc

SEQ ID NO: 4824 - DNA, 21 bp, Zea mays
atctggggctacctcctgagc

SEQ ID NO: 4825 - DNA, 21 bp, Zea mays
gatccggcatgagctgctcct

SEQ ID NO: 4826 - DNA, 21 bp, Zea mays
atggtggcccaggcacgacac

SEQ ID NO: 4827 - DNA, 21 bp, Zea mays
tgccccacatgtcatagacac

SEQ ID NO: 4828 - DNA, 21 bp, Zea mays
gctcgattgcatgcttgcacc

SEQ ID NO: 4829 - DNA, 21 bp, Zea mays
ccgcacatcgccgtgaccgtc

SEQ ID NO: 4830 - DNA, 21 bp, Zea mays
atgccgaagctccctggattg

SEQ ID NO: 4831 - DNA, 21 bp, Zea mays
gagggcatctccaacaacgga

SEQ ID NO: 4832 - DNA, 21 bp, Zea mays
tggaagacactcggcaaagag

SEQ ID NO: 4833 - DNA, 21 bp, Zea mays
ccactccagtgagccgagggc

SEQ ID NO: 4834 - DNA, 21 bp, Zea mays
gcccagcgcataactctggcc

SEQ ID NO: 4835 - DNA, 21 bp, Zea mays
aggcagactccggtcgagacg

SEQ ID NO: 4836 - DNA, 21 bp, Zea mays
aaacatgttcggttacaccaa

SEQ ID NO: 4837 - DNA, 21 bp, Zea mays
gtacttactcctggcagctct

SEQ ID NO: 4838 - DNA, 21 bp, Zea mays
gccgatcaaccatatcgcgga

SEQ ID NO: 4839 - DNA, 21 bp, Zea mays
tctgcaggtatgctcttcccg

SEQ ID NO: 4840 - DNA, 21 bp, Zea mays
ggagtgtcgcacgcgagggtg

SEQ ID NO: 4841 - DNA, 21 bp, Zea mays
ccgaggccttacgtcaggctc

SEQ ID NO: 4842 - DNA, 21 bp, Zea mays
ggtcatcgtcaacgtcagctc

SEQ ID NO: 4843 - DNA, 21 bp, Zea mays
tggacgcaacatgctgacgct

SEQ ID NO: 4844 - DNA, 21 bp, Zea mays
taggcacggcccgttcagccc

SEQ ID NO: 4845 - DNA, 21 bp, Zea mays
atatacccgaacccctaaccc

SEQ ID NO: 4846 - DNA, 21 bp, Zea mays
agtacgccacccagcagcttc

SEQ ID NO: 4847 - DNA, 21 bp, Zea mays
tgccgtcgcaacgcacgggca

SEQ ID NO: 4848 - DNA, 21 bp, Zea mays
ggcgcagacctcctcctggca

SEQ ID NO: 4849 - DNA, 21 bp, Zea mays
tcgtggccatccgaagtctcg

SEQ ID NO: 4850 - DNA, 21 bp, Zea mays
agagccgctttgttccagttc

SEQ ID NO: 4851 - DNA, 21 bp, Zea mays
agtgtctttgccgagtgcaat

SEQ ID NO: 4852 - DNA, 21 bp, Zea mays
attaagggcctgtttggttca

SEQ ID NO: 4853 - DNA, 21 bp, Zea mays
ccggagaagccagtccacgct

SEQ ID NO: 4854 - DNA, 21 bp, Zea mays
tggctgctcatcaactttccg

SEQ ID NO: 4855 - DNA, 21 bp, Zea mays
ttgcccgagtttcgcttcgac

SEQ ID NO: 4856 - DNA, 21 bp, Zea mays
gccctcattgctgcagtcccg

SEQ ID NO: 4857 - DNA, 21 bp, Zea mays
tccatggcagatggcttcgga

SEQ ID NO: 4858 - DNA, 21 bp, Zea mays
tcgtcctctaaacagtcctct

SEQ ID NO: 4859 - DNA, 21 bp, Zea mays
gtgggtgcccgtgcgttgcaa

SEQ ID NO: 4860 - DNA, 21 bp, Zea mays
cagtgcacagcctccctctcg

SEQ ID NO: 4861 - DNA, 21 bp, Zea mays
ccaaaagcactagctgagtct

SEQ ID NO: 4862 - DNA, 21 bp, Zea mays
tgctggagttagcctaacaat

SEQ ID NO: 4863 - DNA, 21 bp, Zea mays
gtccggccgagaaaatccccg

SEQ ID NO: 4864 - DNA, 21 bp, Zea mays
agcttctttgccgagtgctgt

SEQ ID NO: 4865 - DNA, 21 bp, Zea mays
gttgcgagaagcagacgattc

SEQ ID NO: 4866 - DNA, 21 bp, Zea mays
aacgtctttgccgagtgcccg

SEQ ID NO: 4867 - DNA, 21 bp, Zea mays
aagaccggcccatctatgcag

SEQ ID NO: 4868 - DNA, 21 bp, Zea mays
tagggcccgttcggttgtacc

SEQ ID NO: 4869 - DNA, 21 bp, Zea mays
cgtgggccttacgtcaggctc

SEQ ID NO: 4870 - DNA, 21 bp, Zea mays
ggagccacaaaaccggagggg

SEQ ID NO: 4871 - DNA, 21 bp, Zea mays
gccccaagggatcgttcagct

SEQ ID NO: 4872 - DNA, 21 bp, Zea mays
gaaacccggcagatagcgcga

SEQ ID NO: 4873 - DNA, 21 bp, Zea mays
cccgtcggccagagagtaggc

SEQ ID NO: 4874 - DNA, 21 bp, Zea mays
ctgcggacggcgattttggag

SEQ ID NO: 4875 - DNA, 21 bp, Zea mays
tgacaagcactcggcaaagac

SEQ ID NO: 4876 - DNA, 21 bp, Zea mays
tgcgtggcactcggcaaagag

SEQ ID NO: 4877 - DNA, 21 bp, Zea mays
ccagtcgccctgcactcagtc

SEQ ID NO: 4878 - DNA, 21 bp, Zea mays
ctcggcgtcatcatcattggc

SEQ ID NO: 4879 - DNA, 21 bp, Zea mays
gaaacttctttgccgagtgcc

SEQ ID NO: 4880 - DNA, 21 bp, Zea mays
atctagacactcggcaaagag

SEQ ID NO: 4881 - DNA, 21 bp, Zea mays
tccgacggccctgtacgaggc

SEQ ID NO: 4882 - DNA, 21 bp, Zea mays
agccaaccccacccttcgccg

SEQ ID NO: 4883 - DNA, 21 bp, Zea mays
acccgttgcaacgcacgggca

SEQ ID NO: 4884 - DNA, 21 bp, Zea mays
actacgagtcgagcgagctca

SEQ ID NO: 4885 - DNA, 21 bp, Zea mays
gctgtccttgcagtcaaaaga

SEQ ID NO: 4886 - DNA, 21 bp, Zea mays
cacattaagttcgacggtacc

SEQ ID NO: 4887 - DNA, 21 bp, Zea mays
cggttcaaccgccctagggcc

SEQ ID NO: 4888 - DNA, 21 bp, Zea mays
ggttcgccacccagcagcttc

SEQ ID NO: 4889 - DNA, 21 bp, Zea mays
ccgtctgtccaccctgctgac

SEQ ID NO: 4890 - DNA, 21 bp, Zea mays
tccaagcgatcaacagcctgc

SEQ ID NO: 4891 - DNA, 21 bp, Zea mays
ggtcgtgccggttctgggctg

SEQ ID NO: 4892 - DNA, 21 bp, Zea mays
gctccctttgccgagtgccag

SEQ ID NO: 4893 - DNA, 21 bp, Zea mays
catggccttgttcgtttgtgt

SEQ ID NO: 4894 - DNA, 21 bp, Zea mays
gaccggcggtacttactcctg

SEQ ID NO: 4895 - DNA, 21 bp, Zea mays
ggttgcgccaccggaccacca

SEQ ID NO: 4896 - DNA, 21 bp, Zea mays
accttccgccttggcggcctc

SEQ ID NO: 4897 - DNA, 21 bp, Zea mays
tggaaactcagggtggacagc

SEQ ID NO: 4898 - DNA, 21 bp, Zea mays
agtgcacccgccctaagtcct

SEQ ID NO: 4899 - DNA, 21 bp, Zea mays
gaatgtttgcagcccctcaca

SEQ ID NO: 4900 - DNA, 21 bp, Zea mays
tttggcgccaagatctatggc

SEQ ID NO: 4901 - DNA, 21 bp, Zea mays
ccggaccgccgtttggccatc

SEQ ID NO: 4902 - DNA, 21 bp, Zea mays
ccgcacggtactgcagtatgc

SEQ ID NO: 4903 - DNA, 21 bp, Zea mays
ctactttgccgagtgccagag

SEQ ID NO: 4904 - DNA, 21 bp, Zea mays
cagtagacactcggcaaagag

SEQ ID NO: 4905 - DNA, 21 bp, Zea mays
tacgtttggtttctagggact

SEQ ID NO: 4906 - DNA, 21 bp, Zea mays
taggtcgagcttccgaattcg

SEQ ID NO: 4907 - DNA, 21 bp, Zea mays
tgccgagtgtcatccagctgg

SEQ ID NO: 4908 - DNA, 21 bp, Zea mays
agatgcacgcgctactttatg

SEQ ID NO: 4909 - DNA, 21 bp, Zea mays
cccacactctccgtcgtgcaa

SEQ ID NO: 4910 - DNA, 21 bp, Zea mays
tccgtattcgtccgacaccag

SEQ ID NO: 4911 - DNA, 21 bp, Zea mays
atataggttctttgccgagtg

SEQ ID NO: 4912 - DNA, 21 bp, Zea mays
gtggcgaggtcggccgacgag

SEQ ID NO: 4913 - DNA, 21 bp, Zea mays
tgccctcgtcgacgctcctcc

SEQ ID NO: 4914 - DNA, 21 bp, Zea mays
cctgaacaggcccctcacgcg

SEQ ID NO: 4915 - DNA, 21 bp, Zea mays
ccctcccaccacaaccgcgca

SEQ ID NO: 4916 - DNA, 21 bp, Zea mays
cagcgggtctccgcctgagcg

SEQ ID NO: 4917 - DNA, 21 bp, Zea mays
aggcgctaacttcctacgaca

SEQ ID NO: 4918 - DNA, 21 bp, Zea mays
ggaccttctttgccgagtgcc

SEQ ID NO: 4919 - DNA, 21 bp, Zea mays
acggaagcttaacccggagac

SEQ ID NO: 4920 - DNA, 21 bp, Zea mays
gagctcatcgtagtggttgtc

SEQ ID NO: 4921 - DNA, 21 bp, Zea mays
gcttcgccagtatgccatcgg

SEQ ID NO: 4922 - DNA, 21 bp, Zea mays
gtggagctcgacgcagtcaca

SEQ ID NO: 4923 - DNA, 21 bp, Zea mays
ggactcctcgccgccgacgag

SEQ ID NO: 4924 - DNA, 21 bp, Zea mays
ggctagtgccgtgcctgggcc

SEQ ID NO: 4925 - DNA, 21 bp, Zea mays
atctcaggaatccccgccatc

SEQ ID NO: 4926 - DNA, 21 bp, Zea mays
cctcggcagaaccgtgcacca

SEQ ID NO: 4927 - DNA, 21 bp, Zea mays
gtcgcgcgcttcagcgccatc

SEQ ID NO: 4928 - DNA, 21 bp, Zea mays
cagtcgattaccaacgcagcc

SEQ ID NO: 4929 - DNA, 21 bp, Zea mays
gctgcgagaagcagacgattc

SEQ ID NO: 4930 - DNA, 21 bp, Zea mays
gtcggaatcgctcggtccacg

SEQ ID NO: 4931 - DNA, 21 bp, Zea mays
gagtgctcatgcgttgcaacg

SEQ ID NO: 4932 - DNA, 21 bp, Zea mays
cgcctcgaccacttcaccgga

SEQ ID NO: 4933 - DNA, 21 bp, Zea mays
ccgtagaaaccaaacaccccc

SEQ ID NO: 4934 - DNA, 21 bp, Zea mays
gttctttctttgccgagtgct

SEQ ID NO: 4935 - DNA, 21 bp, Zea mays
cgatcgtgccgggctggcccg

SEQ ID NO: 4936 - DNA, 21 bp, Zea mays
tgactgtttcttctggacggt

SEQ ID NO: 4937 - DNA, 21 bp, Zea mays
cccttcgctgaattccctcgg

SEQ ID NO: 4938 - DNA, 21 bp, Zea mays
tggtagacactcggcaaagag

SEQ ID NO: 4939 - DNA, 21 bp, Zea mays
aggtccagcactgacttcgac

SEQ ID NO: 4940 - DNA, 21 bp, Zea mays
aaagctcgcgctaacctgctc

SEQ ID NO: 4941 - DNA, 21 bp, Zea mays
ttctgcccggaggtcgttggt

SEQ ID NO: 4942 - DNA, 21 bp, Zea mays
gcagatccgtcgaagaagagc

SEQ ID NO: 4943 - DNA, 21 bp, Zea mays
cctgtggaggtcctggacctt

SEQ ID NO: 4944 - DNA, 21 bp, Zea mays
caagccagtctgccacagtca

SEQ ID NO: 4945 - DNA, 21 bp, Zea mays
tatgcgcagtggcaggggcgg

SEQ ID NO: 4946 - DNA, 21 bp, Zea mays
cagtacccgaacccctaaccc

SEQ ID NO: 4947 - DNA, 21 bp, Zea mays
ctcggcgccatagtctatggc

SEQ ID NO: 4948 - DNA, 21 bp, Zea mays
cgccgatcagccgtatcgcgg

SEQ ID NO: 4949 - DNA, 21 bp, Zea mays
cccatctttgccgagtgcctt

SEQ ID NO: 4950 - DNA, 21 bp, Zea mays
tttccttctttgccgagtgtc

SEQ ID NO: 4951 - DNA, 21 bp, Zea mays
ctgtctccagcagcgtcccct

SEQ ID NO: 4952 - DNA, 21 bp, Zea mays
cgcccaaacaggctgtcgggt

SEQ ID NO: 4953 - DNA, 21 bp, Zea mays
ccgagtgcccgaaataaaaca

SEQ ID NO: 4954 - DNA, 21 bp, Zea mays
ctccaccccgcagacgacgaa

SEQ ID NO: 4955 - DNA, 21 bp, Zea mays
ggcctcaaccctcctccgttg

SEQ ID NO: 4956 - DNA, 21 bp, Zea mays
ctgatctggcactcggcaaag

SEQ ID NO: 4957 - DNA, 21 bp, Zea mays
ctcctgctccccgctcaggcg

SEQ ID NO: 4958 - DNA, 21 bp, Zea mays
ccttagagcaactccaatagt

SEQ ID NO: 4959 - DNA, 21 bp, Zea mays
aacctctttgtcgagtgtcac

SEQ ID NO: 4960 - DNA, 21 bp, Zea mays
gtgacatactcggacggtccg

SEQ ID NO: 4961 - DNA, 21 bp, Zea mays
cgatgacactcggcaaaggct

SEQ ID NO: 4962 - DNA, 21 bp, Zea mays
gccgtcgcaacgcacgggcac

SEQ ID NO: 4963 - DNA, 21 bp, Zea mays
agctcgccgactgaccgtcgt

SEQ ID NO: 4964 - DNA, 21 bp, Zea mays
gttacgccctgcccagacgac

SEQ ID NO: 4965 - DNA, 21 bp, Zea mays
tatttggcactcggcaaagag

SEQ ID NO: 4966 - DNA, 21 bp, Zea mays
tgcaatcaaaccatccagagc

SEQ ID NO: 4967 - DNA, 21 bp, Zea mays
atatgtttggttcgtggctaa

SEQ ID NO: 4968 - DNA, 21 bp, Zea mays
gtttgcttgattcgtggtcag

SEQ ID NO: 4969 - DNA, 21 bp, Zea mays
aaagaggttctttgccgagtg

SEQ ID NO: 4970 - DNA, 21 bp, Zea mays
gcttgtggtgtgcaggtgtgg

SEQ ID NO: 4971 - DNA, 21 bp, Zea mays
tctgccgtaggaagttagcgg

SEQ ID NO: 4972 - DNA, 21 bp, Zea mays
cactcgccatcgtcggggtag

SEQ ID NO: 4973 - DNA, 21 bp, Zea mays
caacatcccactcgaccgtcc

SEQ ID NO: 4974 - DNA, 21 bp, Zea mays
gtccaccgctctggaggcctt

SEQ ID NO: 4975 - DNA, 21 bp, Zea mays
cgggcacacggtagcttcgcg

SEQ ID NO: 4976 - DNA, 21 bp, Zea mays
cgccaaccagcaccccgctgg

SEQ ID NO: 4977 - DNA, 21 bp, Zea mays
gacggccgaaggcttatgtcc

SEQ ID NO: 4978 - DNA, 21 bp, Zea mays
ctccgcatccaccgcaccacg

SEQ ID NO: 4979 - DNA, 21 bp, Zea mays
agcagccaggctcccaggaaa

SEQ ID NO: 4980 - DNA, 21 bp, Zea mays
tacatgcccgtgcgttgcgac

SEQ ID NO: 4981 - DNA, 21 bp, Zea mays
gctagcgtctctggtttgcct

SEQ ID NO: 4982 - DNA, 21 bp, Zea mays
ttacactcggcaaagcctttg

SEQ ID NO: 4983 - DNA, 21 bp, Zea mays
gccctcgaccacttcaccgga

SEQ ID NO: 4984 - DNA, 21 bp, Zea mays
acttctttgtcgagtgtcaca

SEQ ID NO: 4985 - DNA, 21 bp, Zea mays
tgtctgctcatcaactttccg

SEQ ID NO: 4986 - DNA, 21 bp, Zea mays
ctatgtttggttcgtggctaa

SEQ ID NO: 4987 - DNA, 21 bp, Zea mays
tttagcgccacagcctatggc

SEQ ID NO: 4988 - DNA, 21 bp, Zea mays
tgctcggcgccataggctgtg

SEQ ID NO: 4989 - DNA, 21 bp, Zea mays
cctcctccggttttgtggctc

SEQ ID NO: 4990 - DNA, 21 bp, Zea mays
tgggagccacaaaaccggagg

SEQ ID NO: 4991 - DNA, 21 bp, Zea mays
aatatggcactcggcaaagag

SEQ ID NO: 4992 - DNA, 21 bp, Zea mays
gagcggacgaccaagtctctg

SEQ ID NO: 4993 - DNA, 21 bp, Zea mays
gctcagccacccgccaatgat

SEQ ID NO: 4994 - DNA, 21 bp, Zea mays
ctcgaccgtccgattgcgtcc

SEQ ID NO: 4995 - DNA, 21 bp, Zea mays
cccggcccaagcacggcacgg

SEQ ID NO: 4996 - DNA, 21 bp, Zea mays
ctggccgtgctttttagtgcc

SEQ ID NO: 4997 - DNA, 21 bp, Zea mays
ccataaaaccggaggggattg

SEQ ID NO: 4998 - DNA, 21 bp, Zea mays
acgccacacgccgcggacgcg

SEQ ID NO: 4999 - DNA, 21 bp, Zea mays
tcatatcaagcgtttgacttt

SEQ ID NO: 5000 - DNA, 21 bp, Zea mays
aggcggactagagtcaagctc

SEQ ID NO: 5001 - DNA, 21 bp, Zea mays
gccaatttctgggtccgccac

SEQ ID NO: 5002 - DNA, 21 bp, Zea mays
tttgggggggggggggggggt

SEQ ID NO: 5003 - DNA, 21 bp, Zea mays
gcccagccacccgccaatgat

SEQ ID NO: 5004 - DNA, 21 bp, Zea mays
gcaccggtctgcttcccactc

SEQ ID NO: 5005 - DNA, 21 bp, Zea mays
cggcctgggtgcattctctat

SEQ ID NO: 5006 - DNA, 21 bp, Zea mays
ttcccgttgcaacgcacgagt

SEQ ID NO: 5007 - DNA, 21 bp, Zea mays
atttgcttgagccttcttctc

SEQ ID NO: 5008 - DNA, 21 bp, Zea mays
acaccgcttcccagacacatg

SEQ ID NO: 5009 - DNA, 21 bp, Zea mays
tccaaaaaccggaggggattg

SEQ ID NO: 5010 - DNA, 21 bp, Zea mays
gtaggcgccaagatctatggc

SEQ ID NO: 5011 - DNA, 21 bp, Zea mays
ctctctttgtcgagtgtcaca

SEQ ID NO: 5012 - DNA, 21 bp, Zea mays
gcccgtcgagcaacccagcaa

SEQ ID NO: 5013 - DNA, 21 bp, Zea mays
tcctccccgcaaagctcattc

SEQ ID NO: 5014 - DNA, 21 bp, Zea mays
gtagcgaaccaaacagaccct

SEQ ID NO: 5015 - DNA, 21 bp, Zea mays
cttggcgccacagatcttggc

SEQ ID NO: 5016 - DNA, 21 bp, Zea mays
tctcggcgccaagatctgtgg

SEQ ID NO: 5017 - DNA, 21 bp, Zea mays
cggtgccacagatcttggtgc

SEQ ID NO: 5018 - DNA, 21 bp, Zea mays
tactttgccgagtgtcaaaaa

SEQ ID NO: 5019 - DNA, 21 bp, Zea mays
gtctgtaacgcacggacactc

SEQ ID NO: 5020 - DNA, 21 bp, Zea mays
ccgagtcaccaaatcagccct

SEQ ID NO: 5021 - DNA, 21 bp, Zea mays
gactgtgtcgggccagcccgt

SEQ ID NO: 5022 - DNA, 21 bp, Zea mays
gctctttgccgagtgcttttt

SEQ ID NO: 5023 - DNA, 21 bp, Zea mays
gggtgcagccggactaagcac

SEQ ID NO: 5024 - DNA, 21 bp, Zea mays
ggcggcacatcgcctgtcagt

SEQ ID NO: 5025 - DNA, 21 bp, Zea mays
gtgatagcagcagttgcggtc

SEQ ID NO: 5026 - DNA, 21 bp, Zea mays
cggaaagcgcgcacgaccacg

SEQ ID NO: 5027 - DNA, 21 bp, Zea mays
cctgtcaaccgaacgggccct

SEQ ID NO: 5028 - DNA, 21 bp, Zea mays
tcgtacctcgacgtgaccgcc

SEQ ID NO: 5029 - DNA, 21 bp, Zea mays
ccgcagtccttgctgtctgcc

SEQ ID NO: 5030 - DNA, 21 bp, Zea mays
gtatatgggcctgtttggttc

SEQ ID NO: 5031 - DNA, 21 bp, Zea mays
cagccagcctaggatcgagtg

SEQ ID NO: 5032 - DNA, 21 bp, Zea mays
tcctgtcctctcctgcggaag

SEQ ID NO: 5033 - DNA, 21 bp, Zea mays
ttgacactcggcaaaaccttc

SEQ ID NO: 5034 - DNA, 21 bp, Zea mays
ccttgtcaccaaatcagccct

SEQ ID NO: 5035 - DNA, 21 bp, Zea mays
ccaggcaggggcggacccata

SEQ ID NO: 5036 - DNA, 21 bp, Zea mays
gcctgtaacgcacggacactc

SEQ ID NO: 5037 - DNA, 21 bp, Zea mays
tttgcttctttgccgagtgcc

SEQ ID NO: 5038 - DNA, 21 bp, Zea mays
catcgccggctcatagagtac

SEQ ID NO: 5039 - DNA, 21 bp, Zea mays
cctgcgcccgcaacaagtggg

SEQ ID NO: 5040 - DNA, 21 bp, Zea mays
ccggaaacagttctagaccag

SEQ ID NO: 5041 - DNA, 21 bp, Zea mays
gactctttgtcgagtgtcaca

SEQ ID NO: 5042 - DNA, 21 bp, Zea mays
cttgcttctttgccgagtgtc

SEQ ID NO: 5043 - DNA, 21 bp, Zea mays
caacgcacgggcatccaccta

SEQ ID NO: 5044 - DNA, 21 bp, Zea mays
tctttaaggccttgttcggtt

SEQ ID NO: 5045 - DNA, 21 bp, Zea mays
cggacgcaacatgctgacgct

SEQ ID NO: 5046 - DNA, 21 bp, Zea mays
aaggagggagggagggaggga

SEQ ID NO: 5047 - DNA, 21 bp, Zea mays
taggtcctcgtgccggagcaa

SEQ ID NO: 5048 - DNA, 21 bp, Zea mays
gccgatttgcacgagaggact

SEQ ID NO: 5049 - DNA, 21 bp, Zea mays
ctgcctgctctgcctcctgct

SEQ ID NO: 5050 - DNA, 21 bp, Zea mays
aacttctttgccgagtgcccg

SEQ ID NO: 5051 - DNA, 21 bp, Zea mays
gggcttgtttggttcatgact

SEQ ID NO: 5052 - DNA, 21 bp, Zea mays
gtcgttctcacatgggcttcg

SEQ ID NO: 5053 - DNA, 21 bp, Zea mays
cgactgcaaactaaaatgttt

SEQ ID NO: 5054 - DNA, 21 bp, Zea mays
accaacaggtcctccgagcaa

SEQ ID NO: 5055 - DNA, 21 bp, Zea mays
gggtgctccgccactgcgtgt

SEQ ID NO: 5056 - DNA, 21 bp, Zea mays
ttccctccggttttgtggctc

SEQ ID NO: 5057 - DNA, 21 bp, Zea mays
tgtgagccacaaaaccggagg

SEQ ID NO: 5058 - DNA, 21 bp, Zea mays
atccggggctacctcctgagc

SEQ ID NO: 5059 - DNA, 21 bp, Zea mays
tcacgagccgagtcgagccga

SEQ ID NO: 5060 - DNA, 21 bp, Zea mays
cggtcgattaccaacgcagcc

SEQ ID NO: 5061 - DNA, 21 bp, Zea mays
tggggcaatcggacagatcct

SEQ ID NO: 5062 - DNA, 21 bp, Zea mays
acagactttgccgagtgccag

SEQ ID NO: 5063 - DNA, 21 bp, Zea mays
ccggtcgccctgcactcagtc

SEQ ID NO: 5064 - DNA, 21 bp, Zea mays
ggctcaccacatcacaactcg

SEQ ID NO: 5065 - DNA, 21 bp, Zea mays
ggacctggagcactcctggaa

SEQ ID NO: 5066 - DNA, 21 bp, Zea mays
catcgggtctccgcctgagcg

SEQ ID NO: 5067 - DNA, 21 bp, Zea mays
tggtgcatcatgggttcattc

SEQ ID NO: 5068 - DNA, 21 bp, Zea mays
ggctgatccacggggaattgg

SEQ ID NO: 5069 - DNA, 21 bp, Zea mays
tgatccgagccgagctgacca

SEQ ID NO: 5070 - DNA, 21 bp, Zea mays
gtccgtcgctgaggacgcctc

SEQ ID NO: 5071 - DNA, 21 bp, Zea mays
gtcccactcgacagtccaacc

SEQ ID NO: 5072 - DNA, 21 bp, Zea mays
ctagtacagcagccactcggc

SEQ ID NO: 5073 - DNA, 21 bp, Zea mays
tggatcaccaaatcagccctt

SEQ ID NO: 5074 - DNA, 21 bp, Zea mays
ggtttacgcagtgcagtccct

SEQ ID NO: 5075 - DNA, 21 bp, Zea mays
gagccgacccaagcggagacg

SEQ ID NO: 5076 - DNA, 21 bp, Zea mays
ggcctgcagcgctagcgtcac

SEQ ID NO: 5077 - DNA, 21 bp, Zea mays
tccggtcaccaaatcagccct

SEQ ID NO: 5078 - DNA, 21 bp, Zea mays
agtcgggacgtcaggaccagg

SEQ ID NO: 5079 - DNA, 21 bp, Zea mays
gcacttactcctggcagctct

SEQ ID NO: 5080 - DNA, 21 bp, Zea mays
cccaacgcccagccatgcgcc

SEQ ID NO: 5081 - DNA, 21 bp, Zea mays
acctgagccctcgcagtctcg

SEQ ID NO: 5082 - DNA, 21 bp, Zea mays
tggccttccgtcctcggcacg

SEQ ID NO: 5083 - DNA, 21 bp, Zea mays
tcgacgccatagcctatggcg

SEQ ID NO: 5084 - DNA, 21 bp, Zea mays
cgaaaatcggtgcgtccggtg

SEQ ID NO: 5085 - DNA, 21 bp, Zea mays
cctcgatcgcaacgggtcgga

SEQ ID NO: 5086 - DNA, 21 bp, Zea mays
cctacgcccgcaacaagtggg

SEQ ID NO: 5087 - DNA, 21 bp, Zea mays
tccgagaggcacccgcaccag

SEQ ID NO: 5088 - DNA, 21 bp, Zea mays
gtcgttcgtcgagtgtttggc

SEQ ID NO: 5089 - DNA, 21 bp, Zea mays
tgagtgcccgtgcgttgcgac

SEQ ID NO: 5090 - DNA, 21 bp, Zea mays
tggggaagacaagcggtccag

SEQ ID NO: 5091 - DNA, 21 bp, Zea mays
aaagggcctctagctgagttg

SEQ ID NO: 5092 - DNA, 21 bp, Zea mays
ataagggcttgtttggtttgt

SEQ ID NO: 5093 - DNA, 21 bp, Zea mays
ttagctttgtgccgcactgtg

SEQ ID NO: 5094 - DNA, 21 bp, Zea mays
cggtgccccgcttccgaccca

SEQ ID NO: 5095 - DNA, 21 bp, Zea mays
ccgaaccgcctgggacatcac

SEQ ID NO: 5096 - DNA, 21 bp, Zea mays
gcatgtcggggctcagcaccc

SEQ ID NO: 5097 - DNA, 21 bp, Zea mays
gcccggcccaagcccgaaaag

SEQ ID NO: 5098 - DNA, 21 bp, Zea mays
agaggtggtaatggatcacga

SEQ ID NO: 5099 - DNA, 21 bp, Zea mays
gcaccgcttcccagacacatg

SEQ ID NO: 5100 - DNA, 21 bp, Zea mays
ccggcaacacggtccactcca

SEQ ID NO: 5101 - DNA, 21 bp, Zea mays
ggcttctttgccgagtgcctg

SEQ ID NO: 5102 - DNA, 21 bp, Zea mays
aggcactcggcaaagaaggct

SEQ ID NO: 5103 - DNA, 21 bp, Zea mays
tacgtaggaggcgctgtaggg

SEQ ID NO: 5104 - DNA, 21 bp, Zea mays
gccagaatcgctcggtccacg

SEQ ID NO: 5105 - DNA, 21 bp, Zea mays
catatagggcctgtttggttc

SEQ ID NO: 5106 - DNA, 21 bp, Zea mays
acaacgcacgggcactcacct

SEQ ID NO: 5107 - DNA, 21 bp, Zea mays
cagcatcccactcgaccgtcc

SEQ ID NO: 5108 - DNA, 21 bp, Zea mays
ccgatctggcactcggcaaag

SEQ ID NO: 5109 - DNA, 21 bp, Zea mays
cattctggtttgcagccggct

SEQ ID NO: 5110 - DNA, 21 bp, Zea mays
gactcgatctcgtcgtcgttc

SEQ ID NO: 5111 - DNA, 21 bp, Zea mays
ggagcgggcggcggctgatca

SEQ ID NO: 5112 - DNA, 21 bp, Zea mays
gcactcggcaaagagggctcg

SEQ ID NO: 5113 - DNA, 21 bp, Zea mays
ccgatcaccaaatcagccctt

SEQ ID NO: 5114 - DNA, 21 bp, Zea mays
tttctttgccgagtgcttttt

SEQ ID NO: 5115 - DNA, 21 bp, Zea mays
agctcaccacatcacaactcg

SEQ ID NO: 5116 - DNA, 21 bp, Zea mays
tcgtgcgactactctgggcca

SEQ ID NO: 5117 - DNA, 21 bp, Zea mays
tcctggaacatcgacaacctc

SEQ ID NO: 5118 - DNA, 21 bp, Zea mays
tcgtccgtcggatgctgccca

SEQ ID NO: 5119 - DNA, 21 bp, Zea mays
cgtcctgctagcctccagcct

SEQ ID NO: 5120 - DNA, 21 bp, Zea mays
ctgctggagagcgaaatagtg

SEQ ID NO: 5121 - DNA, 21 bp, Zea mays
cccgtgcgttgcaacgggaac

SEQ ID NO: 5122 - DNA, 21 bp, Zea mays
acagggagtccctcatggcct

SEQ ID NO: 5123 - DNA, 21 bp, Zea mays
gccatagtgccaccgggccgg

SEQ ID NO: 5124 - DNA, 21 bp, Zea mays
cttacacgcttgcacctaacg

SEQ ID NO: 5125 - DNA, 21 bp, Zea mays
gagctctttgccgagtgcccg

SEQ ID NO: 5126 - DNA, 21 bp, Zea mays
tattgtagactgcccccgcct

SEQ ID NO: 5127 - DNA, 21 bp, Zea mays
ccgccgccaccgcaaccaccg

SEQ ID NO: 5128 - DNA, 21 bp, Zea mays
taccaacgcagcctgatcagc

SEQ ID NO: 5129 - DNA, 21 bp, Zea mays
ggactgatttggtgattaggg

SEQ ID NO: 5130 - DNA, 21 bp, Zea mays
attcgtggctaactgtgtcac

SEQ ID NO: 5131 - DNA, 21 bp, Zea mays
tcgagggtaccgctgcgttcg

SEQ ID NO: 5132 - DNA, 21 bp, Zea mays
cgacgtggacgagccaacttc

SEQ ID NO: 5133 - DNA, 21 bp, Zea mays
cccgacccaaatgtacaccta

SEQ ID NO: 5134 - DNA, 21 bp, Zea mays
agatcgccaaccaggtcgcgg

SEQ ID NO: 5135 - DNA, 21 bp, Zea mays
gggtcatgggccacaacacgc

SEQ ID NO: 5136 - DNA, 21 bp, Zea mays
tttcctccggttttgtggctc

SEQ ID NO: 5137 - DNA, 21 bp, Zea mays
ttagagccacaaaaccggagg

SEQ ID NO: 5138 - DNA, 21 bp, Zea mays
gccaaaaaccggaggggattg

SEQ ID NO: 5139 - DNA, 21 bp, Zea mays
atcggcccaagcacggcacgg

SEQ ID NO: 5140 - DNA, 21 bp, Zea mays
gggcttgttcggttacaccaa

SEQ ID NO: 5141 - DNA, 21 bp, Zea mays
tacctagggcctgtttggttc

SEQ ID NO: 5142 - DNA, 21 bp, Zea mays
gtcgctcacgcggacaaggtt

SEQ ID NO: 5143 - DNA, 21 bp, Zea mays
ttgtccaccaactgcatcttg

SEQ ID NO: 5144 - DNA, 21 bp, Zea mays
gtataggttctttgccgagtg

SEQ ID NO: 5145 - DNA, 21 bp, Zea mays
ttgcgtgccgtgcctgggcca

SEQ ID NO: 5146 - DNA, 21 bp, Zea mays
ttgctggcccaggcacggcac

SEQ ID NO: 5147 - DNA, 21 bp, Zea mays
gtactttctttgccgagtgct

SEQ ID NO: 5148 - DNA, 21 bp, Zea mays
ccagcatccgacgacgacgcc

SEQ ID NO: 5149 - DNA, 21 bp, Zea mays
tttggtttgtggagtcactct

SEQ ID NO: 5150 - DNA, 21 bp, Zea mays
catccgtgccgggctggcccg

SEQ ID NO: 5151 - DNA, 21 bp, Zea mays
aaatccgaggctttgccgagt

SEQ ID NO: 5152 - DNA, 21 bp, Zea mays
cctctttgccgagagccaacg

SEQ ID NO: 5153 - DNA, 21 bp, Zea mays
ctcagcgccatagtctatggc

SEQ ID NO: 5154 - DNA, 21 bp, Zea mays
gcgagacgaccgttgaaactg

SEQ ID NO: 5155 - DNA, 21 bp, Zea mays
gacggcagttgtcgctccccc

SEQ ID NO: 5156 - DNA, 21 bp, Zea mays
tttgccctacgctccccgctc

SEQ ID NO: 5157 - DNA, 21 bp, Zea mays
tgttgttgcaacgcacgggca

SEQ ID NO: 5158 - DNA, 21 bp, Zea mays
ccgcatagcgcagacagccgt

SEQ ID NO: 5159 - DNA, 21 bp, Zea mays
tctgctccggttttgtggctc

SEQ ID NO: 5160 - DNA, 21 bp, Zea mays
tggcaacgcacgggcacctac

SEQ ID NO: 5161 - DNA, 21 bp, Zea mays
ttctttgccgagtgtcacact

SEQ ID NO: 5162 - DNA, 21 bp, Zea mays
tgaatgcccgtgcgttgctac

SEQ ID NO: 5163 - DNA, 21 bp, Zea mays
ccctgacactcggcaaagcac

SEQ ID NO: 5164 - DNA, 21 bp, Zea mays
ggcccagcccactaagaaaac

SEQ ID NO: 5165 - DNA, 21 bp, Zea mays
taggtgcccgtgcgttgcgac

SEQ ID NO: 5166 - DNA, 21 bp, Zea mays
tctggaccgtccgtggcacgg

SEQ ID NO: 5167 - DNA, 21 bp, Zea mays
aaggtcgccctgcactcagtc

SEQ ID NO: 5168 - DNA, 21 bp, Zea mays
gccttacgtcagactccgccc

SEQ ID NO: 5169 - DNA, 21 bp, Zea mays
cgaggccacgtcgacgccacg

SEQ ID NO: 5170 - DNA, 21 bp, Zea mays
gaccaagttatcccagcaacc

SEQ ID NO: 5171 - DNA, 21 bp, Zea mays
gtttagaaaccaaacaccccc

SEQ ID NO: 5172 - DNA, 21 bp, Zea mays
ccgcgctcggccggtcacgca

SEQ ID NO: 5173 - DNA, 21 bp, Zea mays
atgcacgcacgacttcgccta

SEQ ID NO: 5174 - DNA, 21 bp, Zea mays
gcctgcgcacgcaaccgctac

SEQ ID NO: 5175 - DNA, 21 bp, Zea mays
cctaggatcggcttacccatg

SEQ ID NO: 5176 - DNA, 21 bp, Zea mays
agctaaccccacccttcgccg

SEQ ID NO: 5177 - DNA, 21 bp, Zea mays
ctgaagcaggttgttgggtgc

SEQ ID NO: 5178 - DNA, 21 bp, Zea mays
cctggcccaacccacaaccag

SEQ ID NO: 5179 - DNA, 21 bp, Zea mays
gctcagatcaaccgacactcg

SEQ ID NO: 5180 - DNA, 21 bp, Zea mays
tcgggcgactactctgggcca

SEQ ID NO: 5181 - DNA, 21 bp, Zea mays
tcaaagcacggtccgacacga

SEQ ID NO: 5182 - DNA, 21 bp, Zea mays
gctcgcctcagcttcgctctg

SEQ ID NO: 5183 - DNA, 21 bp, Zea mays
agccaggctcaccagatacga

SEQ ID NO: 5184 - DNA, 21 bp, Zea mays
tgcccgccgtacgaagtcgtc

SEQ ID NO: 5185 - DNA, 21 bp, Zea mays
gtccgcttcgggagcgtcacc

SEQ ID NO: 5186 - DNA, 21 bp, Zea mays
ccagtcaccaaatcagccctt

SEQ ID NO: 5187 - DNA, 21 bp, Zea mays
aaggatggcgcagagccgaag

SEQ ID NO: 5188 - DNA, 21 bp, Zea mays
caagtcaagcccacggccagc

SEQ ID NO: 5189 - DNA, 21 bp, Zea mays
aagctggcactcggcaaagaa

SEQ ID NO: 5190 - DNA, 21 bp, Zea mays
tttagtgcgcactttgtcctc

SEQ ID NO: 5191 - DNA, 21 bp, Zea mays
tcgttgtgccacgccgtacca

SEQ ID NO: 5192 - DNA, 21 bp, Zea mays
cgcacctggtcggtacgtggt

SEQ ID NO: 5193 - DNA, 21 bp, Zea mays
accatggcactcggcaaagaa

SEQ ID NO: 5194 - DNA, 21 bp, Zea mays
tctcaagaaccctagagccta

SEQ ID NO: 5195 - DNA, 21 bp, Zea mays
caccgagcaacccagcgaggc

SEQ ID NO: 5196 - DNA, 21 bp, Zea mays
tcatccaccaactgcatcttg

SEQ ID NO: 5197 - DNA, 21 bp, Zea mays
cccctgacgcagcaccgttgg

SEQ ID NO: 5198 - DNA, 21 bp, Zea mays
aaactgctttcgttgagagtc

SEQ ID NO: 5199 - DNA, 21 bp, Zea mays
cgtgcttctttgccgagtgtc

SEQ ID NO: 5200 - DNA, 21 bp, Zea mays
gcgcctttgccgagtgtcacc

SEQ ID NO: 5201 - DNA, 21 bp, Zea mays
ctaggctcaatcgctgcaagc

SEQ ID NO: 5202 - DNA, 21 bp, Zea mays
accatccctgcaacctggttc

SEQ ID NO: 5203 - DNA, 21 bp, Zea mays
tcgcggccatccgaagtctcg

SEQ ID NO: 5204 - DNA, 21 bp, Zea mays
aagcactcggcaaagccgccg

SEQ ID NO: 5205 - DNA, 21 bp, Zea mays
agagcttctttgccgagtgcc

SEQ ID NO: 5206 - DNA, 21 bp, Zea mays
cgttgagcaacccagcgaggc

SEQ ID NO: 5207 - DNA, 21 bp, Zea mays
tctgcgcacctggtcggtacg

SEQ ID NO: 5208 - DNA, 21 bp, Zea mays
atacgcagcacgcctcagctt

SEQ ID NO: 5209 - DNA, 21 bp, Zea mays
cttgccctacgctccccgctc

SEQ ID NO: 5210 - DNA, 21 bp, Zea mays
gagagcgcagcaaaacgggtg

SEQ ID NO: 5211 - DNA, 21 bp, Zea mays
ggacactcggcaaagccgccg

SEQ ID NO: 5212 - DNA, 21 bp, Zea mays
gagacttctttgccgagtgtc

SEQ ID NO: 5213 - DNA, 21 bp, Zea mays
ggaatccgagcctttgccgag

SEQ ID NO: 5214 - DNA, 21 bp, Zea mays
gaggtcagctcggctcggctc

SEQ ID NO: 5215 - DNA, 21 bp, Zea mays
tggtagatcggaccttggtcc

SEQ ID NO: 5216 - DNA, 21 bp, Zea mays
gtcgtcgaccacttcaccgga

SEQ ID NO: 5217 - DNA, 21 bp, Zea mays
tagctccccaaacccgtcccc

SEQ ID NO: 5218 - DNA, 21 bp, Zea mays
aagtccaccacctgttttgac

SEQ ID NO: 5219 - DNA, 21 bp, Zea mays
gacaggcggtacttactcctg

SEQ ID NO: 5220 - DNA, 21 bp, Zea mays
ttcctagggaagccaccgttg

SEQ ID NO: 5221 - DNA, 21 bp, Zea mays
gacgtcctcgtcggtcaaccc

SEQ ID NO: 5222 - DNA, 21 bp, Zea mays
cgacgcgtcgtcgtcgtcgtc

SEQ ID NO: 5223 - DNA, 21 bp, Zea mays
gcggccgtaggaagttagcgg

SEQ ID NO: 5224 - DNA, 21 bp, Zea mays
gcccagaacaacccgagagtc

SEQ ID NO: 5225 - DNA, 21 bp, Zea mays
ctcttagggtgcgtttggttg

SEQ ID NO: 5226 - DNA, 21 bp, Zea mays
gacatgcctgcctgcctgcct

SEQ ID NO: 5227 - DNA, 21 bp, Zea mays
tgatcctggtcctcctcttgg

SEQ ID NO: 5228 - DNA, 21 bp, Zea mays
ccacaccgcacacaaagtcca

SEQ ID NO: 5229 - DNA, 21 bp, Zea mays
tagccacaaaccaaacaggcc

SEQ ID NO: 5230 - DNA, 21 bp, Zea mays
atgagtgcccgtgcgttgcaa

SEQ ID NO: 5231 - DNA, 21 bp, Zea mays
tcacccctctgtaatgggcct

SEQ ID NO: 5232 - DNA, 21 bp, Zea mays
gattcgccctgttggccccac

SEQ ID NO: 5233 - DNA, 21 bp, Zea mays
gagccttctttgccgagtgcc

SEQ ID NO: 5234 - DNA, 21 bp, Zea mays
cagcagacactcggcaaagag

SEQ ID NO: 5235 - DNA, 21 bp, Zea mays
cggagctccggctgcgcaaga

SEQ ID NO: 5236 - DNA, 21 bp, Zea mays
ccaggctcaatcgctgcaagc

SEQ ID NO: 5237 - DNA, 21 bp, Zea mays
tcctagaaaccaaacaccccc

SEQ ID NO: 5238 - DNA, 21 bp, Zea mays
aaaacttctttgccgagtgcc

SEQ ID NO: 5239 - DNA, 21 bp, Zea mays
ccccgttcgcgtccaggcctc

SEQ ID NO: 5240 - DNA, 21 bp, Zea mays
aaccctaagacaaaaccgcct

SEQ ID NO: 5241 - DNA, 21 bp, Zea mays
gatctggcactcggcaaagaa

SEQ ID NO: 5242 - DNA, 21 bp, Zea mays
actgagaggcacccgcaccag

SEQ ID NO: 5243 - DNA, 21 bp, Zea mays
actcagccacccgccaatgat

SEQ ID NO: 5244 - DNA, 21 bp, Zea mays
cacgatgggccggcccaggca

SEQ ID NO: 5245 - DNA, 21 bp, Zea mays
tgtcaggttctttgccgagtg

SEQ ID NO: 5246 - DNA, 21 bp, Zea mays
gccctgtttgggacagctgct

SEQ ID NO: 5247 - DNA, 21 bp, Zea mays
aaaatctttgccgagtgcccg

SEQ ID NO: 5248 - DNA, 21 bp, Zea mays
acgatctttgccgagtgctcg

SEQ ID NO: 5249 - DNA, 21 bp, Zea mays
tccgtcgcaacgcacggacac

SEQ ID NO: 5250 - DNA, 21 bp, Zea mays
aagctctttgccgagtgcccg

SEQ ID NO: 5251 - DNA, 21 bp, Zea mays
agttgtttggttcgtggctaa

SEQ ID NO: 5252 - DNA, 21 bp, Zea mays
ttctttaccgagtgtctgaag

SEQ ID NO: 5253 - DNA, 21 bp, Zea mays
gtgggaccgtctgtgtctatg

SEQ ID NO: 5254 - DNA, 21 bp, Zea mays
aagaattcatggtcggtcagt

SEQ ID NO: 5255 - DNA, 21 bp, Zea mays
ggagcgcgcagtcacagccag

SEQ ID NO: 5256 - DNA, 21 bp, Zea mays
gttttggcactcggcaaagaa

SEQ ID NO: 5257 - DNA, 21 bp, Zea mays
accacccaacccctgttaggg

SEQ ID NO: 5258 - DNA, 21 bp, Zea mays
gccgagcgaagtctccccttc

SEQ ID NO: 5259 - DNA, 21 bp, Zea mays
gaacggcactcggcaaagaca

SEQ ID NO: 5260 - DNA, 21 bp, Zea mays
ccccatacccgctacccgatg

SEQ ID NO: 5261 - DNA, 21 bp, Zea mays
gcttctccgctgctcctctgc

SEQ ID NO: 5262 - DNA, 21 bp, Zea mays
tggtcccggtccaggggttgt

SEQ ID NO: 5263 - DNA, 21 bp, Zea mays
cgggtctttgccgagtgctcg

SEQ ID NO: 5264 - DNA, 21 bp, Zea mays
ctagggcctgtttggttcggc

SEQ ID NO: 5265 - DNA, 21 bp, Zea mays
cgccagcttggcctccgcctg

SEQ ID NO: 5266 - DNA, 21 bp, Zea mays
cacccaatctcactcaatcca

SEQ ID NO: 5267 - DNA, 21 bp, Zea mays
cggcctcacgcgagcctgctc

SEQ ID NO: 5268 - DNA, 21 bp, Zea mays
tctggcactcggcaaagacct

SEQ ID NO: 5269 - DNA, 21 bp, Zea mays
atcgtcattagcgccatctcc

SEQ ID NO: 5270 - DNA, 21 bp, Zea mays
ccgtggatcagcccggtctgg

SEQ ID NO: 5271 - DNA, 21 bp, Zea mays
ggggtggctcggggagactct

SEQ ID NO: 5272 - DNA, 21 bp, Zea mays
ctcgtggctcgctcggttcat

SEQ ID NO: 5273 - DNA, 21 bp, Zea mays
cccaaacccatacccgcgaag

SEQ ID NO: 5274 - DNA, 21 bp, Zea mays
gtggtacttactcctgacagc

SEQ ID NO: 5275 - DNA, 21 bp, Zea mays
tggctctgcccgaggcaaggc

SEQ ID NO: 5276 - DNA, 21 bp, Zea mays
ccgcctgtccaccctgctgac

SEQ ID NO: 5277 - DNA, 21 bp, Zea mays
gcgcgcgtcgtcgtcgtcgtc

SEQ ID NO: 5278 - DNA, 21 bp, Zea mays
tacctcggcgccatagatctt

SEQ ID NO: 5279 - DNA, 21 bp, Zea mays
ctcccccgtgctgccgctgtc

SEQ ID NO: 5280 - DNA, 21 bp, Zea mays
tcagtccagcgctacagaacc

SEQ ID NO: 5281 - DNA, 21 bp, Zea mays
agctcggcgccacagatcttg

SEQ ID NO: 5282 - DNA, 21 bp, Zea mays
agatctgtggcgccgagctag

SEQ ID NO: 5283 - DNA, 21 bp, Zea mays
ataagaaggccgagcccaccg

SEQ ID NO: 5284 - DNA, 21 bp, Zea mays
ttctgttgcaacgcacgggca

SEQ ID NO: 5285 - DNA, 21 bp, Zea mays
ctcccagactccgcatccctc

SEQ ID NO: 5286 - DNA, 21 bp, Zea mays
aagacttctttgccgagtgtc

SEQ ID NO: 5287 - DNA, 21 bp, Zea mays
aaagactttgccgagtgccag

SEQ ID NO: 5288 - DNA, 21 bp, Zea mays
ccgacgaaggaaggtgcgcag

SEQ ID NO: 5289 - DNA, 21 bp, Zea mays
ttcagcactcggcaaagacct

SEQ ID NO: 5290 - DNA, 21 bp, Zea mays
attctctttgtcgagtgtcac

SEQ ID NO: 5291 - DNA, 21 bp, Zea mays
tctttagggtgcgtttggttg

SEQ ID NO: 5292 - DNA, 21 bp, Zea mays
ccgtgcctcgtgctggtccat

SEQ ID NO: 5293 - DNA, 21 bp, Zea mays
catgccctacgctccccgctc

SEQ ID NO: 5294 - DNA, 21 bp, Zea mays
tcatcctggccagccagatac

SEQ ID NO: 5295 - DNA, 21 bp, Zea mays
cagcagactccggtcgagacg

SEQ ID NO: 5296 - DNA, 21 bp, Zea mays
tcggaaacagttctagaccag

SEQ ID NO: 5297 - DNA, 21 bp, Zea mays
tgatttgggccggcctattag

SEQ ID NO: 5298 - DNA, 21 bp, Zea mays
cacaatttctggcacggccca

SEQ ID NO: 5299 - DNA, 21 bp, Zea mays
aaagcatccgacgacgacgcc

SEQ ID NO: 5300 - DNA, 21 bp, Zea mays
ttcacgatggccagcttgttc

SEQ ID NO: 5301 - DNA, 21 bp, Zea mays
tgtgtggcactcggcaaagag

SEQ ID NO: 5302 - DNA, 21 bp, Zea mays
gccatcgaccctcctgtacgc

SEQ ID NO: 5303 - DNA, 21 bp, Zea mays
ctcaccctctgtaatgggcct

SEQ ID NO: 5304 - DNA, 21 bp, Zea mays
tgctggacgcacgacttcgcc

SEQ ID NO: 5305 - DNA, 152 bp, Zea mays
cgactattattagggctagtttgggagtccaaaaaccggaggggattagagaggctaaataccctttttattcaaaattgaataaggaggaaattttagcccctccgaccccttccagttttgtggctttcaaactagcccttaatgggttg

SEQ ID NO: 5306 - DNA, 102 bp, Zea mays
cttgttcgctgcggcttgctgcggctgcaatccggctgcggctgcggcttctacagtatttttctctctatggattgcagctgcagcagtccaaacagctgc

SEQ ID NO: 5307 - DNA, 149 bp, Zea mays
ctacttgactaaggccttgttcgtttgtattcgattgcacctggaatcgttccacctaatcagagtttatataaattagagaagcaatccggttagaaatcgttttgaccaaccaatccggcacaaacgaatcaggcctaataggttgc

SEQ ID NO: 5308 - DNA, 123 bp, Zea mays
  unsure (50)..(51)..(52)..(53)..(54)..(55)..(56)..(57)..(58)..(59): n = A, C, G or T
  unsure (61): n = A, C, G or T
tcgtgtcgtgtgtgcctggctccctgtatgccacacatgtagccaacctnnnnnnnnnngncaacccgtggcgtgattggatgctgtgggtggcgtgcaaggagccaagcatgcataacaggc

SEQ ID NO: 5309 - DNA, 71 bp, Zea mays
tttattagcgtttgttatgtgaatttgtgcactaaggtgtgtgtcaaaaacaggtggtggacttccggatc

SEQ ID NO: 5310 - DNA, 227 bp, Zea mays
tagtggcggcgacgacgacgacgatgacccagtgggccagatcctcgagtccccaaacctcaagatatacaccttcgcggagctcaagagcgccaccaggaacttcaggccggagacggtgctcggggagggcgggttcggcaaggtgtacaagggctgggtcgatgagaagaccatgaacccatccaaggctagcactggcgtcatggtcgccgtcaagaagctca

SEQ ID NO: 5311 - DNA, 147 bp, Zea mays
tctgatcatataccaggatgggagatgctcaccaagtgatcgtcatttaacaacactgacttagtgttatcccaggttgtaatttttgttctgttgtggatggtgctaagtgccggtgggctcggccttcttatatatgtgtatctc

SEQ ID NO: 5312 - DNA, 239 bp, Zea mays
  unsure (84)..(85)..(86)..(87)..(88)..(89)..(90)..(91)..(92)..(93): n = A, C, G or T
ccggagaaggtggcggccgccgtgtttgtcaccgcgttcctgccggactgcaccaacccgcgctcgcaggtcatcgagaaggtnnnnnnnnnncgcgctcgcaggtcatcgagaaggtagtacacgtgtacgcttgttgctgttggtctttcagtttagctaacggaagagctgaccctgatgccgacatgaatggtctcccctgttccggccggccggccggccgtcactaccgtcga

SEQ ID NO: 5313 - DNA, 252 bp, Zea mays
  unsure (122)..(123)..(124)..(125)..(126)..(127)..(128)..(129)..(130)..(131): n = A, C, G or T
ttcctttttgccctggactcttctgttttccttcttwacgagaggaagctgtttctggtacaatgcagaaagaaggcttctggtaatttttagaagttggtgttaagtaaccctagttaggnnnnnnnnnnaggttagggttatgtgggcaaatccctgctttgcccctgaggggtttcacatttttatataaggaacctgtacaccccttcatatgacagagatcagaaagagaccagaggcccaccccta

SEQ ID NO: 5314 - DNA, 177 bp, Zea mays
tggtagctctggtagccaaggatgacttgcctgtgtgctggccacgctcccctcatgcaaggaccatctcgtgtcgaccgacgagcgagcgagcgatcgatcgatgagaggatgacgaagcttggggtgtacgttggtctctcacgggcagtctccttggctagccctgactcactc

SEQ ID NO: 5315 - DNA, 74 bp, Zea mays
  unsure (66)..(67)..(68)..(69)..(70)..(71)..(72)..(73)..(74): n = A, C, G or T
ccaaacaaaaaacagagccgctccgttccagtttaccaaacacagaacagagcggctccgttcctnnnnnnnnn

SEQ ID NO: 5316 - DNA, 182 bp, Zea mays
  unsure (99)..(100)..(101)..(102)..(103)..(104)..(105)..(106)..(107)..(108): n = A, C, G or T
gcgtgcaatcaaactatccagagcatccaatctagatccaacggtttcatatggaagtggttaaaattaaaataggtactatgttttaggtgtaaggtnnnnnnnnnntggaaggggttaaatataaaataacagtcatcattagatctagatcggatgcaccagatcgcttgattgcatgc

SEQ ID NO: 5317 - DNA, 198 bp, Zea mays
ggcggcggcgcccggctctgctcggacggactccaccgaaggctcggctcccctcggactccacctgcgacggccggccctctgcctgcaccgacggtgcccggctccctcggcatccaccagcggtgcccgactccaagaaatgtacaagtcacggctgcaggagctgtgccagaagcggcgatgggcgccgccgtt

SEQ ID NO: 5318 - DNA, 90 bp, Zea mays
caatacacatggattgaatgggtttggaaaaaattatgaagaagtttgacttgcgtgggattcaaacccatccaatcccactcaatccac

SEQ ID NO: 5319 - DNA, 125 bp, Zea mays
gacaaaatactcgtggctgataagctcattgttgactcgactcgttttcaattttatcgcgagctaaactaccatcttagctcggtttgttaaggagccagctcgttagctcgaactagcaacta

SEQ ID NO: 5320 - DNA, 153 bp, Zea mays
atttgacatgcttcggaagctgtggcggaactgcccgaattattccaacttaagtgtccaagtcccgccttagaggctagaccacacttaaatgggaataacccgtcaatccctcggatctagtccgacacggccactgacaggatcaagtac

SEQ ID NO: 5321 - DNA, 71 bp, Zea mays
ttgcataacctttctgcctaaggttaattgttcaatacagacgactaaccttaggcaaaatgtggcacatt

SEQ ID NO: 5322 - DNA, 243 bp, Zea mays
cgcaaaggcgtggtcgttctcctcgagcatcgatttagggttcttcggctttctatgatcaggaggagttgctggattattttatcagggaacagaatggtgtgattcgttgattggattacagtctggatctctcttgcatcaaatggttgagcaaggcaaaccacgaagcatcccgacgaaggcgaagaaatcgccgttcgtggaggtagaggttgacgagattggccaggctagtggggt

SEQ ID NO: 5323 - DNA, 86 bp, Zea mays
  unsure (39)..(40)..(41)..(42)..(43)..(44)..(45)..(46)..(47)..(48): n = A, C, G or T
tttctgtcatggcttcattctggttcagctgccgctctnnnnnnnnnnatggattgagagctaaccgaacaagcccgtagtgggat

SEQ ID NO: 5324 - DNA, 109 bp, Zea mays
ggttcgtgcctaaatatgccacactttacctaaggttagtcgttcgaattgaagaactaaccttagacacaaaagttaggcaaagtgtggcaagttaaccatcaaacca

SEQ ID NO: 5325 - DNA, 142 bp, Zea mays
tgatcccctaagggctaatttggtgattagggatccctaggggatccatgggggaggaatcccctcgcaatttaattttgaatagcaagaggatttcttcccctcgggatccccggtcaccaaattaaccctaaaggcctat

SEQ ID NO: 5326 - DNA, 148 bp, Zea mays
aattcatattaggtcttgttcgtttccgtcggattggacccggaatcgttcgagctaatcaaagtttatataaattagagaagcaatccggttatgaattgttccgacccatcaatccggcacaaacgaacaaagtcttaatgaaata

SEQ ID NO: 5327 - DNA, 76 bp, Zea mays
tggctgggctcaccgactgcaacccagctctcactccgatggaggagaggctgaagttgagtcgcgacagcacgac

SEQ ID NO: 5328 - DNA, 117 bp, Zea mays
ggtatttcttgctgagtaattgcgtactcagggttttattccctgttgtttttcaggttatatttttgttctgttgtggatggtgctaagtgccggtgggctcggccttcttatata

SEQ ID NO: 5329 - DNA, 152 bp, Zea mays
  unsure (1)..(2)..(3)..(4): n = A, C, G or T
nnnngatttattcgggtcttgttcgtttgtgccggattgatgtcagaacgatttctaaccggattgtttctctaatttatataaattttaattagctagaacgatttcggatgcaatccgacacaaacgaacaagacctcagttgactaaaa

SEQ ID NO: 5330 - DNA, 235 bp, Zea mays
gaggagcgtctggcgcgcctccgcggcgaggcggcggcgtggcaggccaaggcgctctccgagcaggccgccgcggtcgccctgcacgcgcagctgcagcaggccgcggccgcggcgcgggcgtcggtcgaggagctcaccgccgccgccgccgcgggcgacgccggcccggcggagtcgtcggcgtcggcgttcgtggaccctcgccgcgccgggccgccgccagaccacgcgt

SEQ ID NO: 5331 - DNA, 148 bp, Zea mays
  unsure (1)..(2)..(3): n = A, C, G or T
nnnttactaagggcctgtttggtttgtggctaactatgccacactctgtctaaggttagtcgttcaaattggagaactaaccttagacagaaaagttaggcaaagtgtgacaagttaggcagcgaaccaaacaaaccctaaaatttaa

SEQ ID NO: 5332 - DNA, 110 bp, Zea mays
tggttcgtatctaaatgtgccacactttgcctaagattagtcgttcgaattgaagaactacccttaggcataaaagttaggcaaagtgtggcaacttaggcataaccaaa

SEQ ID NO: 5333 - DNA, 259 bp, Zea mays
  unsure (63)..(64)..(65)..(66)..(67)..(68)..(69)..(70)..(71)..(72): n = A, C, G or T
ttgacggcgtcgtcgtcggcgcggacgagagctacgagctgccggtcgtcgacatggccagtnnnnnnnnnncactacccgccctgccgccagcgggagaaggtgatgggcatcacgccgcacacggacgggctgggcctcacgctgctgctgcacgtggacgacacgcccggcctgcagatccgcaggggcggcaggtggttccccgtgcgcccgctgccgggcgccttcgtcgtcaacgtcgccgacatcctggacg

SEQ ID NO: 5334 - DNA, 212 bp, Zea mays
gtcatagaattaggccctgtttggaagcaacctagtttttaagagactgcttttatcttttacctaagagagtctagcttcttggtttttaagaaactaagaatctaatttctataaactgagttctaaactgatatgtttggaagaacctcaatttctataaagcagtttcttaaaaattgggtgcttccaaatagggccttagacggcca

SEQ ID NO: 5335 - DNA, 72 bp, Zea mays
agggtcataacactcggcaaagagccaaaacttgggcaccggtttaggtactttgctgagtgttatgtcgct

SEQ ID NO: 5336 - DNA, 120 bp, Zea mays
aagcttgcctctttgccgagtgccagcgacataacactcagcaaagtacctaaaccggtgcccaagttttggctctttgccgagtgttatgaccctgacactcggcaaagcgcctctttg

SEQ ID NO: 5337 - DNA, 226 bp, Zea mays
gatcaggatgcagagctcccttcaatccaaagagcggccagcaagggggcggtgcagctcctcgggtcatgcaaaccacaagcctatctcaaagacgagagaaaccctcccccatggattacatatatacacatgatgagataggatagtgggaaccatgaacgagcagcggaaccagcccttcggaacgacccttcattggaatgataggagctccgcttcaaac

SEQ ID NO: 5338 - DNA, 138 bp, Zea mays
aattccgctttactttgatgtgatacttgttaaagatacaatgttcagatgatgtaataaagtattatactctctttacgcctttattgcattgtcttttgatatattacacttgtgacgtcaacatatgtgtggaaa

SEQ ID NO: 5339 - DNA, 119 bp, Zea mays
tcgtgctcggtggagaagatgggcacatgaagaaccatccatccacccacccacccagctgatggagctcggcggcattggatggtaatgcacgtgccctgcttctccaccacgcacag

SEQ ID NO: 5340 - DNA, 219 bp, Zea mays
agacagcgcagatttgcgcgtgtttgagagtagctaaggctaatgtaaaacaaaactcggaaaataaaggaggcgcagctcctgtataaatagagagggggcgcagcccctaggggcggccaaccctaggtcgtccattatgggccgcaattgggctggtcgtctattcttccgggccttcgttctttaacaacatgatgtagttcaattctcttgcac

SEQ ID NO: 5341 - DNA, 143 bp, Zea mays
aagttgggtgtcaaaaacaggtggtggacttccggatcgttcttagggattttgcccgaacttcggtaaaggcaagtaaatacagtggtggttgctaccatttggtttgcatcctattccctgtcattgagtatgcataagtt

SEQ ID NO: 5342 - DNA, 94 bp, Zea mays
aatctgaggactgatttggtgaccagggatcacgagtggatccatggtgaatgatcccctcgtgatctctggttaccaaaccagccctaaggtc

SEQ ID NO: 5343 - DNA, 119 bp, Zea mays
attgacgaatctggaccctatgctcgggactgggtcacctggaagcagattttcttgctggttgatgtgatctgctgctgtgctgtgctcttcccgattgtgtggtccatcaagaacct

SEQ ID NO: 5344 - DNA, 197 bp, Zea mays
tcacacatttggtgcaagcatgcaatcaaatcatccaggaatccaatctagatccaacggtttcatatgaaatggggttaaatgtaaaaataagtacaaggttgctggtttcacgcggaaggagttaaaggtaaactagcagttactattggattttcattggatgaatttgattgcttgattgcacgcatgcacaa

SEQ ID NO: 5345 - DNA, 94 bp, Zea mays
gagcgcgcgcaggagcccgacgtctgcatcttcccctggtaccccaccacggggtaccccgtgaacagcaggccgttgttcttcagcccgttgc

SEQ ID NO: 5346 - DNA, 226 bp, Zea mays
cgcttcctcctcgtcgtcaaccgccgccgcccccacgccttcttccaaccctttgcacgagccgaggcctctccacctctcgctcaagcccgtcttacccctccccaaaccgcatgcgctctcctgctccgcgccgcacatcccccgcgccgccgctggggacggatcgggcgtcgggaatggaggcaaggatggaggcggcggcgggggtggcgaggatgaagac

SEQ ID NO: 5347 - DNA, 79 bp, Zea mays
  unsure (36)..(37)..(38)..(39)..(40)..(41)..(42)..(43)..(44)..(45): n = A, C, G or T
ctgtcatggcttcattctggttcagctgccgctctnnnnnnnnnnatggattgagagctaaccgaacaagcccgtagtg

SEQ ID NO: 5348 - DNA, 148 bp, Zea mays
gctagtagtagggcctgtttggtttgatggttaacttgccacactttgcctaacttttgtgtctaaggttagttcttcaattcgaacgactaaccttaggtaaagtgtggcatatttaggcacgaaccaaacagccccgtagtcctct

SEQ ID NO: 5349 - DNA, 93 bp, Zea mays
ggtccgtccgggcgtagtgcacgtggaagcagcgcttacaggagctgcatgaggcggcgcgcgggcttcttcttgcgcaggccgacgagcgag

SEQ ID NO: 5350 - DNA, 108 bp, Zea mays
tacttcttatcagtggcggacgcaggacgaaaattcagggggggctaaaaaggccacatgagagacatgattttctagttcgccatgtccgtcgatcgcatgagacaa

SEQ ID NO: 5351 - DNA, 85 bp, Zea mays
ctcaggctcgggctcgggctctcagcgacggcgtcagcggcttcccctcccgcctctcgctagtcgactcgcgccctcgcatccg

SEQ ID NO: 5352 - DNA, 176 bp, Zea mays
gcggcgggcacgaggccgcgggcgggtggcgccggtcggcgggccacgcggacgccaagcgcagccccggcggcgacgccggaggggccgcggcgcgcgccgtgtgcgtcacgggagggatctccttcgtcgggttcgccgtcgtcgaccgcctcctccggcacgggtacaccgtc

SEQ ID NO: 5353 - DNA, 108 bp, Zea mays
gtgtgcttggcggtgaggtcgttggcgctgtggatggggtcgtcgcagtcggggcacaggatggcgcggtcctccacgcagaacacgaggcccctccgctcctgcaag

SEQ ID NO: 5354 - DNA, 238 bp, Zea mays
ttcaaacgggaggcagaaccaggggaggaagcttaccccttaaatcttcatagtagtagagatatatgcatggacacgtaactatatccagataatagatgaattggtaaaggactcaataacattgatgtggggatttcttatcctcttcttgtcaagcttgattgcgtaaggtggtggcctttgggatctagtacagaaacgtgccaatctccccctcgatctgcccctaatgttg

SEQ ID NO: 5355 - DNA, 85 bp, Zea mays
cgtactgcaggggcagtagggtcactgcgcgcgggccctgtcgcacgcgggggccacgcggcagtgcccaccccccacgtcagag

SEQ ID NO: 5356 - DNA, 122 bp, Zea mays
gcaagcttgcctctttgccgagtgccagcgacataacactcagcaaagtacctaaaccggtgcccaagttttggctctttgccgagtgttatgaccctgacactcggcaaagcgcctctttg

SEQ ID NO: 5357 - DNA, 150 bp, Zea mays
acacattatgagaccttgttcgtttgtgtcggtttggtgggtcggaataaatcttagccgaattgcttctctaatttatataaactttgattagctggaacgattccggatgcaatccgacacaaacgaacaaggcctaagtttgctgca

SEQ ID NO: 5358 - DNA, 212 bp, Zea mays
tgcaagcattcattagatgcaagcgtgcaagcagctcttttaatacattggatctaaatccaactatatgtgtaattgtggtttgttagggactttttttataaaagtacacgagtggtggtgggtaggatttaaatattaaatatagcatacggttagatctagcggaccaaaagatctgcttgcacgcttgcacataatggatgcttgca

SEQ ID NO: 5359 - DNA, 141 bp, Zea mays
cctccaatagcagccataactccattgaagaatatggcaacggtctgctcattagctgttggaggaagtccacccacatagacacgccgagcatgccgggtagcctgttgtgtcatggcttgtggctgaataacaaggggg

SEQ ID NO: 5360 - DNA, 87 bp, Zea mays
tctcactaggtgagtgcccatgcgttacaacggggacttatgtattatatgtctccgttgcaacgcacggacatatacctagtgaaa

SEQ ID NO: 5361 - DNA, 134 bp, Zea mays
ataaaaccttgttcgtttccgtcggattacacccggaatcgttacagctaatcaaagtttatataaattagagaagcaatccggccagaaatcgttccgacccatcaatccggtagaaacgaacaaggtctaat

SEQ ID NO: 5362 - DNA, 134 bp, Zea mays
attaggtcttgttcgtttccgtcggattggacccggaatcgttcgagctaatcaaagtttatataaattagagaagcaatccggttatgaattgttccgacccatcaatccggcacaaacgaacaaagtcttaa

SEQ ID NO: 5363 - DNA, 199 bp, Zea mays
tagatactaagggggtgtttggtttctagtgactaatttttagtccctacattttattctattttagttccaaaattaccaaatatagaaattagaactctattttagtttctatatttggcaatttatagactaaaatagaataaaatgaaaggactaaacattagtccctataaaccaaacactccctagattttag

SEQ ID NO: 5364 - DNA, 76 bp, Zea mays
cttgcgccacgagcagccaggctcccaaaaaacagaccctgatctcgttcctgtggagccaggctgagaggctaaa

SEQ ID NO: 5365 - DNA, 200 bp, Zea mays
acatattttttttcggtttttcctcgtcaaaatctcttgatttattgtcagaattggcatcgtgcttgtattttgacatgctatatagatggttttagtttgtagtcgcgtctgctaagataaggagcagagttgagtctggcatccaaattctgaagaagacagctaagttggcgagcgaagcggagacccgttgccgg

SEQ ID NO: 5366 - DNA, 100 bp, Zea mays
cagcagccgcaggagcagatgcagacgagggcgacgagcacgacgacgttgagcacggcgatcttgtgccagtcctggcgcacctgctccatgacgccgg

SEQ ID NO: 5367 - DNA, 151 bp, Zea mays
  unsure (147)..(148)..(149)..(150)..(151): n = A, C, G or T
tttaaattttagggtttgtttggttcgctgcctaacttgtcacactttgcctaacttttctgtctaaggttagttctccaatttgaacgactaaccttagacagagtgtggcatagttagccacaaaccaaacaggcccttagtaannnnn

SEQ ID NO: 5368 - DNA, 254 bp, Zea mays
cacgaacccggcgccgcccgtcacgagcacccgcagcgcgcgccgacgcagccccaggggaaccttcccgccgacggactcgcggaaggacgggtgcccgctgacggcaaggtggttgaagccgaccgacgcggcgggttcggacggagataaagtggagggggaagagaaggtgaagatagcggcagcgaagagcatgccggcgagggcgaagacggggcggtgctcggcggcggcgtagcgcgcggcgcggg

SEQ ID NO: 5369 - DNA, 126 bp, Zea mays
gggctgtttggtttgtagctaaatgtgcatcactttgtctaaggttagtcgttcgaattgaataactaaccttaggcacaaaagttaggcaaagtgtggcaagttaggcatcaaatcaaacaggcc

SEQ ID NO: 5370 - DNA, 239 bp, Zea mays
gtgctcctactccagtcggttggcggcgatgcacgggcaggcactgggcgacatgctgatggacagttggtcggcggcgatgcgcaggcagcagcatgcaggtgagcagcatgcaagtggagcggccgagctagctaggcatctagctgtgttcctgcgtgtagcgtgttgcaggcagcagcatgcgggttgtcgagcgagctagcatgcgggcgccgagcgacgacgagctggaagga

SEQ ID NO: 5371 - DNA, 216 bp, Zea mays
  unsure (92)..(93)..(94)..(95)..(96)..(97)..(98)..(99)..(100)..(101): n = A, C, G or T
cacttatcctggtgcaagcatgcaatcaagcgatctggtgcatccgatctagatctaatgatgactgttattttatatttaaccccttccannnnnnnnnnaccttacacctaaaacatagtacctattttaattttaaccacttccatatgaaaccgttggatctagattggatgctctggatagtttgattgcacgcttgcaccgaaatgagtg

SEQ ID NO: 5372 - DNA, 180 bp, Zea mays
cgcaggcgccgccgactgccgtggagagcgcgaggtagctgcgggcaggggcggagggcccattatggctcattatggcccaagccataccaaaaaaaaggtccgccggcccaacatctaaaccctaatcactgccgctccgagcgaccgcgcctccgcccgccgtccgccgccctaaca

SEQ ID NO: 5373 - DNA, 79 bp, Zea mays
tatagaatccgtagcaacgcacgggcacatgactagttctagtatatatatatgatctgtcgatgccacacaacgtaca

SEQ ID NO: 5374 - DNA, 164 bp, Zea mays
  unsure (71)..(72)..(73)..(74)..(75)..(76)..(77)..(78)..(79)..(80): n = A, C, G or T
cgacggcgaccaccagcggcgacgggaacctagggcggcggcacaaggatttttgcgatggatttcccctnnnnnnnnnntagggcggcggcacaactgcaggggcagcgccgcgcgcctccctttttgcgatggattctgttgttcgattggggattttggga

SEQ ID NO: 5375 - DNA, 125 bp, Zea mays
cacgagaaaatgaaactgccacatgatctgaccgtcggttctccatgaaagccaactctttcttcagatgggaatcaaagaacacgtatggtttcagatcatgctggcagcttcatcttcttgtg

SEQ ID NO: 5376 - DNA, 190 bp, Zea mays
gacttagggggtgtttggtttttagggactaatttttagtccctacattttattccactttagttacaaaattatcaaatatagaaactaaaactctattttagtttctatatttgtcaatttatatactaaaatggaccaaaatgaaggactaaacattagtccctagaaaccaaacacccccttaaca

SEQ ID NO: 5377 - DNA, 144 bp, Zea mays
gtttgcgatgtcatgctcttgtcactttcgatgtggctctttgttctctacttctggtttagatggtctggaactccccggtggaaaacctttccccctggttatgttttctttagctgatagttgcgtgagttttgtcggctt

SEQ ID NO: 5378 - DNA, 109 bp, Zea mays
gtgatgtgtgtctatcacaggcggttcttttaaaccggaccgcctgtgatgtgtgactatcacaggcggttcttttaaactggaccgcctgtgatgtgtgtctatcaca

SEQ ID NO: 5379 - DNA, 99 bp, Zea mays
aatgtcaaaaaaagacactcggcaaagaaactctctgtcgaggctcacaaatagaacactcggcaaagagctctttgccgagtgttttttctccaacac

SEQ ID NO: 5380 - DNA, 96 bp, Zea mays
tgttggagaaaaaacactcggcaaagagctctttgccgagtgttctatttgtgagcctcgacagagagtttctttgccgagtgtctttttttgaca

SEQ ID NO: 5381 - DNA, 104 bp, Zea mays
gaatgtcaaaaaaagacactcggcaaagaaactctctgtcgaggctcacaaatagaacactcggcaaagagctctttgccgagtgttttttctccaacactagg

SEQ ID NO: 5382 - DNA, 147 bp, Zea mays
tagagactagtcggttacccgtgcgttgcgatggctcacaataatacctatgtaaattatccaccaaaaagatctcaagattttttattggttgtctccactttttgcataatattttttattaatgcacgggtaccataggcagca

SEQ ID NO: 5383 - DNA, 194 bp, Zea mays
cgcgaaaacatcttaccggacggccgagccacagcgctgcgctgcgcagctccacgccgcttacggtaccccgcagatagcaccaactcgctcgctgaaagcatacgaggcaatggaagcaggctacaaaagaaggcgcagggcatcgttccaactcatacctttctcggccttttggctaagatcaagtgtag

SEQ ID NO: 5384 - DNA, 109 bp, Zea mays
tgacgcctgtcggctgacaaccgacgggaataagtcctaaaccgacgggaattacttattcccgtcggtttaaggcttattcccgtcggttcctggccgacgggaatta

SEQ ID NO: 5385 - DNA, 186 bp, Zea mays
ttacaagcgtgaaagcaaaccatctggtccattagatcgtgattcaaccgtatgtcacatttaacacttaaacccttccaccaccagctcaataatctttataaaaaaaactcctaacaaaccatggttgtatctgtggttggatcgtaatctaatggatcagatggtttgcttgtacgcttgcaa

SEQ ID NO: 5386 - DNA, 78 bp, Zea mays
tgaaaatattcttgcaggtagaagccatcctctccatggttaaattgaggacaacttctatccacaagatctaagaaa

SEQ ID NO: 5387 - DNA, 201 bp, Zea mays
gattaaaacaagtgactgctgtattgctgtccaaaaattctgcttgtgcttatttagtgttagttcacccttttggctaaaaatggttggttagcactaaattaatgtagacttgccatgactaagcttaataatgcacgtgtgtcatgttttgtatgtttcttgctgtagttgattgtgatataggagtctatcgacatt

SEQ ID NO: 5388 - DNA, 203 bp, Zea mays
ggcagggtcccactcgacagtccaacccggtggcagggtggtcggccaagttatcccagcaaccatctcctccagagaacctgtaaaaattatgccacaagcaaggctgagtatactaatactcagctagacttacccggtgtgaggagtctactcctctacctctagacaaccacctgtttggctgtggggtttgtttgcca

SEQ ID NO: 5389 - DNA, 198 bp, Zea mays
attatgttaagggggtgtttggtttctagggactaatgtttagtccttcattttggtccattttagtatataaattgacaaatatagaaactaaaatagagttttagtttctatatttgataattttgtaactaaagtggaataaaatgtagggactaaaaattagtccctaaaaaccaaacaccccctaagtctatg

SEQ ID NO: 5390 - DNA, 192 bp, Zea mays
agacttagggggtgtttggtttttagggactaatttttagtccctacattttattccactttagttacaaaattatcaaatatagaaactaaaactctattttagtttctatatttgtcaatttatatactaaaatggaccaaaatgaaggactaaacattagtccctagaaaccaaacacccccttaacat

SEQ ID NO: 5391 - DNA, 115 bp, Zea mays
tattttcggccagtttttttggcggccagaagccgccgaaattaaaccttttgccgccgaaaatagcttttttttcggtggcttctggccgccgaaaatgactgtagctgttgta

SEQ ID NO: 5392 - DNA, 132 bp, Zea mays
ggagctagtttgagagtccaaatatcggaggggattgaagggactaaaatctctttcttattcaaaattgtataaggagggtattttagccccttcaattccctccggttttgtggcttccaaactagacct

SEQ ID NO: 5393 - DNA, 237 bp, Zea mays
gcaaggagggcagacgagcagcgagcggtttgagaaggcagttagggttctcgcaaagcgtggaaagaaaaagttcaaaacgcgccgccccccgcccccttttatacacagggcattcaattctagacacacccaagtgatcaaatcctctccaaactccacacaacgccctagtgattagagagagagatttgcttgtgttctttcgagctcttgcgcttggattgctttcttctt

SEQ ID NO: 5394 - DNA, 83 bp, Zea mays
gattcatagccggattgcttctctaatttatataaactttgattaggttgaacgattccaggtgcaatccgacacaaacgaac

SEQ ID NO: 5395 - DNA, 144 bp, Zea mays
cacatatagggtctgtttggtttgatgcctaacttgtcacactttgcctaatttttctgcttaaggttagttcttcaattcgaacgcctaaccttaggcaaagtgtggcacatttagccacgaaccaaacagccccatagtata

SEQ ID NO: 5396 - DNA, 135 bp, Zea mays
actctttttgtgagggactgcaaacaacctgatttacagctgggctgcagcaatttttttccctagttacgtggaaaaaaaaattgctgcagcccagctgcaatcaggctgtttgcagccccacacaaaaaagag

SEQ ID NO: 5397 - DNA, 152 bp, Zea mays
ccctcgctcggcgcgcccttacggctcggggctagtgtgcacgcgttgaaatgaaacccgtgtcgtggactcgtggcccgcacaccaagtgagtgccactggacgcgttgaaatgatacggcgctggagcctggaggatcgtcgcgacaggc

SEQ ID NO: 5398 - DNA, 75 bp, Zea mays
gaacgcgacctgatcgacgtcctggggcttcgcccactaacggaaacccagggcttccattacctcttccctata

SEQ ID NO: 5399 - DNA, 179 bp, Zea mays
agtttagcccgggtcacatcaagcgtttaactttcaaataggagtatgaaatatagacccaaccaactgtactagattcgtctcactttttaatcttcggctgagaaattagttttataatccgactacatttaataccccgaacggagattcaaacattcgatgtgataggggctaaa

SEQ ID NO: 5400 - DNA, 130 bp, Zea mays
taggccctgttcggttgtttcggattggagccccggattaattcctagctggattacttctctaatttatatagattttgatgagctggaatgaatcctggctcattccggtacaaccgaacaggccctt

SEQ ID NO: 5401 - DNA, 101 bp, Zea mays
agctgtgatgcactatgtgtacaaacctaaaagatccacattgaaactctatgatttcatgtgtagttctcttaggtttctacacataatgtctcacaact

SEQ ID NO: 5402 - DNA, 110 bp, Zea mays
agtgggacgtgatattggcacggctcaatcagagagcagagccccaccccccctggcctctgctagggctcgagctctcgaattgaaccgcgtcaataccccgtctagct

SEQ ID NO: 5403 - DNA, 224 bp, Zea mays
tctgtctcttaggatgtgtttggttgcgggacaacttaggacagacaggacaggtacattcccttgtgtcatttctcgtacttccaatttagaggtacaattgagaacaacaatgaaatagttatgtcccaacacctgaccctgaatcaaataaacttatttaagggaccgtactatcccatcccatgttgttattataaccaaacacatccttagatatcaac

SEQ ID NO: 5404 - DNA, 103 bp, Zea mays
ttcgtggctaactgtgccacactttgcctaaggttagtcgtccgaattgaagaactaaccttaggcagaaaagttaggcaaagtgtggcaagttaggcagcaa

SEQ ID NO: 5405 - DNA, 178 bp, Zea mays
ttagcccctatcacatcgaatgtttgaacctccgttccgggtattaaatgtagtcggattataaaactaatttgtcagccgaagattaaaagacgagacgaatctagtccagttggctgggtctatatttcatactcctatttgaaagtcaaacgcttgatgtgacccgggctaaact

SEQ ID NO: 5406 - DNA, 155 bp, Zea mays
caatcaaactatccagagcatccaatctagatccaacggtttcatatggaagaggttaaaagtaaaataggtacttatgttttagatggaaggggttaaatataaaataacagtcattattagatctagatcggatgcaccagatcgcttgattg

SEQ ID NO: 5407 - DNA, 85 bp, Zea mays
cggctccgattcacttggtgcaaggcgggatccgtcccgtcggccgggcggcgggtcccgatctgcaccaagcgagcccgaggcg

SEQ ID NO: 5408 - DNA, 101 bp, Zea mays
agctgtaacgcactatgtgtacaaacctaagagatccacattgaaactctatgatttcatgtgtggttctcttaggtttctacacataatgtctcacaatt

SEQ ID NO: 5409 - DNA, 176 bp, Zea mays
ttctctctaaggtatgccttagaggggtgcttgacggggacaagggtatgcccttgaggtttcttgagccagcttctctctaaggtatgccttagagagaggtgcttgacggggacaagggtatacccttgaggttccttgagtcagtttctctctaaggtatgccttagagagag

SEQ ID NO: 5410 - DNA, 176 bp, Zea mays
gtttggttataatgacagaacgggatgagataggacgtaccttaaataaggttgtttagttcagaatcaggggttgagacaggattattccaatgttgtctctagttgcccctcgaaattagagtgacgagagagtacgcctggggacatctctatcctgcctgtcccgtaaccaa

SEQ ID NO: 5411 - DNA, 183 bp, Zea mays
cgacttttgttttttctacagtattttgtctatatggattacagttgcagtagttcgaacgatttttatctagtcacagtgaacaaccccccacatcctattcgcttcagattaaaaccagttgtcctgactgttgtaactacaatccatagaaacaaaataatgtagaagtagtagaagccg

SEQ ID NO: 5412 - DNA, 94 bp, Zea mays
gtggaattgtagtggattaagatgtattgagagagtatttgatctattagggatttgcaccctctccaatcccttcaaaacactccaattccaa

SEQ ID NO: 5413 - DNA, 78 bp, Zea mays
ttcttcttcgtatctctatatcgtcggatcttcttgaccttgcaagaccttttcttgaccttgtaagacccaactcta

SEQ ID NO: 5414 - DNA, 184 bp, Zea mays
agaattgtgaaggaatgaggctgtcatgcatgatctaacaacgatttgcaggcacaaagcgagacacagaccagacgagagcgcgcgaggccactctagtctagctgtgcgtggacgcctgctaatatggtgccaaccaaatcagagctagatcatgctggcagcttcactcattcgcaagagc

SEQ ID NO: 5415 - DNA, 174 bp, Zea mays
tgtgaaggaatgaggctgtcatgcatgatctaacaacgatttgcaggcacaaagcgagacacagaccagacgagagcgcgcgaggccactctagtctagctgtgcgtggacgcctgctaatatggtgccaaccaaatcagagctagatcatgctggcagcttcactcattcgca

SEQ ID NO: 5416 - DNA, 97 bp, Zea mays
aaccagagtcaatattagaggcagcgcatacaagttgtattagagagtatatgttttctataccagagtatcgtttccttttatatttattagcagg

SEQ ID NO: 5417 - DNA, 83 bp, Zea mays
atgctgcacgtgcgacggcaacagagctcgaggttctgcgcggcagtagagctggcagctctgcttctgtcgacgacaacacc

SEQ ID NO: 5418 - DNA, 83 bp, Zea mays
agtttgtggtttaccgagtctgttagattagactgcacttttttctgtaaaatctaatctagagagtggctaaatcagtaaat

SEQ ID NO: 5419 - DNA, 243 bp, Zea mays
ctgcatggtttccatgggctttcttgaaccatcaacaggtcgcgtgagcgagccggggggaagctcagcgatgcgattcgattcaattcaattcacggccggtcggggggaagagaattggtgggtgggactgggactgggactgggaggagccaatcattccgtcccacacacccagcaccagcaccaccaccaccacgcccacgagttcacagttcaagaaagcctgtggaaagcatgccc

SEQ ID NO: 5420 - DNA, 142 bp, Zea mays
gctccgaacctgttttgttggtggtcatttaaccatgcatgcttcgatcgatggattggtgcatgcatggattattgcatagtgtgatgcatgtggcgcatcagtgcatggttagatgaccatcagcaaacatgttcttgag

SEQ ID NO: 5421 - DNA, 77 bp, Zea mays
taagccgtcacatgccacacttttaagccacaagtgttcacacttgtggcttaaaagtgtggcgcggtgtggcggcg

SEQ ID NO: 5422 - DNA, 191 bp, Zea mays
ggatgttccagaatgctagggaatggtgttcttagtgcaggtaaatttgtcttattaaatgcctcatacttctgtttgtggcagtatgaaatcaattctagtagaacctttaacttcctgtgcactgttacatttacatagaaccgatagttaggattgagaatgttattgttaagcttcatttagtagaa

SEQ ID NO: 5423 - DNA, 194 bp, Zea mays
agacagagaggagctcccttcaatccaagcacgagggaaagatgatggcgggctcatctcccgggtcatgcacacccatgcaagtgcagaggtgagcagcggccattgctgcaccagagaggtatccatgaaccggcagctgcaaccgaccacttcccctcctggattggatcgaagggagctcttcgatcgcc

SEQ ID NO: 5424 - DNA, 234 bp, Zea mays
gcggccaccagcagatgaaactacagcatgacctggtcctggtgctcattaattaccctctctctctctcccttcccctctcatcttggattcgtcgatccatatatgacagtcagggacgggggagagagagagagtgacaggggccggtagtagtatagattacatccatcttacatataccaccaccatcataaccagatcatgctggcagcttcaccaactcgtggtgca

SEQ ID NO: 5425 - DNA, 186 bp, Zea mays
ggtaatgtttggttcacaaaatgtaacgtaaagggtaatggtttacactcgattactgtcggtaacaagtttgaatagtctgtatcaatttttagtacggtatctgattacggttaaactaaaacaaacatgaattaacgttatcacttacccattacgttacaattatgtgaaccaaacggtacc

SEQ ID NO: 5426 - DNA, 183 bp, Zea mays
gaggttacaagtgtcggtgatacaaatcttcgctcatcagggatgacaatttggtaataggattactatctaagttgtagcctttatatttttgctctcccaactgcgcttaggtttgtgccgcctgtgtcaatggatttatttgttttgtggatttgtgtggccgtcatccgtttcagatgt

SEQ ID NO: 5427 - DNA, 236 bp, Zea mays
agttttttaagattcatcacaggcttcaactacaacttggctagagaaattttaaaagaaggtatgtagctggtttgtttaatttatttatcctcccaaatatggttactgtccagacacaaagatgtgttttgtaggataaataaattaaggaaatctactatatatatataactttctttggaatttgtctcgcataagttatagttaagccgtgtgataaatcttatggaact

SEQ ID NO: 5428 - DNA, 109 bp, Zea mays
gagtggaaaattccaaagggattgcactgatcttgtcgtcgactcgcatcgcatgcagcaggcggcaggtgagaatagatcaatgcgatccctttggagtcctccacca

SEQ ID NO: 5429 - DNA, 142 bp, Zea mays
gaacaagatgtagccaaggacaacttgccggaagacaggcaccgcacggtatgggctcaaaattccaaacagattgcatatgctcccctgtaacatgcatgctcaaaatacccggcaagtcatccttggctgcatcccactc

SEQ ID NO: 5430 - DNA, 154 bp, Zea mays
agttcggctaggtgagatcctattaacagtagatccaaaaaataccgttcgattgcgtagaaggtaatcgaagcctgtcgcgtaggacagttcggctaggccggtgacctgccggcttgataaagagttgatgcagatctgatcccgcagcaac

SEQ ID NO: 5431 - DNA, 143 bp, Zea mays
acctgattcattagatcatgatccaaccgtaggtcacatttaacacttaaacccttccaccaccagctcaatattttttataaaaaaactcctaacaaactatggttgtatctgtgtttggatcgtaatctaatggaccagat

SEQ ID NO: 5432 - DNA, 108 bp, Zea mays
ttctctagccagcctggctctcatatggaaccaggctatagcctagctctcatatggaaccaggctatagcctggctctcatatggaaccaggctatatagagccgag

SEQ ID NO: 5433 - DNA, 173 bp, Zea mays
cattgctggcgccgatgtcatttttgacggtgttaatatatttcgttggagactgaaatatttgaatttacaatagggaatcttatgattggcttcccgagactccatcagaggggcaacggtgtattaattgtaagtaacatcttatgactggcaacggcttaccggagaag

SEQ ID NO: 5434 - DNA, 142 bp, Zea mays
gtgtctgctgatgcagcatcatcaagattctcatctcatcacatatgcatatagctgctgcgagacatcacagagcatgcatgcatcactgaagatgcgtgagagttggatgtgaatcttggtggtgctgcacctgcaagca

SEQ ID NO: 5435 - DNA, 72 bp, Zea mays
ggacggcgatttaatccgtagacggattcgtatatagacatgttttttgacctatggattagacggtatcta

SEQ ID NO: 5436 - DNA, 194 bp, Zea mays
gtgtaaacatgctaaaacgccttaacaacctttggatctagaatcaaagactaatcttaatcccacctaaccgccaccgcaccagattaccaggagggggttctttagaaaaaacacaagattatcaggtaggattaagattagcctttgattctggatccaaaggttgttaagacgttttaacatgtttacac

SEQ ID NO: 5437 - DNA, 130 bp, Zea mays
ctctgcaatttcccacagctttattgaactgccctcttgcttgcttggatcaattgaaactcgatcaggtccacagcacagcctgctgcatgcatgatgcagttcaagaaagctgtggaagatggcaggg

SEQ ID NO: 5438 - DNA, 116 bp, Zea mays
catcagattttatactcatcccttgtgtgccactgagtggcatataggtatattttttggtgtctatgacatgtggggccagtggcatacaaggaatgagtatatttttcagtggc

SEQ ID NO: 5439 - DNA, 145 bp, Zea mays
aaaatcaatccagaccacaccttccacatccaacggtgctgcgtcagggggttttataaaatgttctttgcaactctgtacattttacaaaaacccccctaacacagcaccgttggatgtggagggtgtgatctggattgatttt

SEQ ID NO: 5440 - DNA, 227 bp, Zea mays
catcctttaaacggtcctctaaatttagatgacgctgctagattctctatatataaagtttctctaaacaatcctctatctatttgaatactttaaataaccggtttaacaaaactaaaatatgtacaatatattgagagtgtgacaaatacgtatgtacaaaaaataaaaataaaaaatgtctctaatgttggtatttgagtatagaggacgtgatttagaggacg

SEQ ID NO: 5441 - DNA, 93 bp, Zea mays
gttctgtaccctaaatttagaggacgaggacgtcctctaccccctccagcaacgtcttctaaacggtcctctaaatttagagaacgctgcgga

SEQ ID NO: 5442 - DNA, 71 bp, Zea mays
gcagatggcttcggataaaaccacgcctaccgcctcagggattggagcaggtttcccccgaagagctgaag

SEQ ID NO: 5443 - DNA, 210 bp, Zea mays
tgcaatcatttatcctggtgcaagcatgcaatcaagcgatctggtgcatccgatctagatctaatgatgactgttattttatatttaaccccttccacctaaaacatagtacctattttatttttaaacccttccatatgaaaccgttagatctagataggatgctctggatagtttgattgcacgtttgcaccaaaatgagtgattgca

SEQ ID NO: 5444 - DNA, 203 bp, Zea mays
ggagctgatgatggccgtcttgcgctcatcagcgaaccccaggttgattcgcttggtttcttcagtcggccgcatagaggtcgcggcctgagcttcgtttgccggtacggcgaggtcttcctcaggcttagaattcgccagtgtcgaggaaaccgtcgatggcttggtgttgagggctgcttggatggccactcgaaaacatt

SEQ ID NO: 5445 - DNA, 83 bp, Zea mays
tgagagaagagtaacacctgaatttggttgataattagaaagaaattttataccccaaattcagggtgttacaactttatatt

SEQ ID NO: 5446 - DNA, 151 bp, Zea mays
cggagacatgggtagcttcgttaagctggcgaggagggcggtggagacggacgcgcctgtcatggtcaaggtgacgaatttctcccaccttgtcagaatcgcatcttggctctgagtttcttggtcttgtttggcgagttgttcctgatga

SEQ ID NO: 5447 - DNA, 230 bp, Zea mays
cttaacacgggtgatggttaggtcgcagcccatcagagtacgagtgactcgaggattgacaagtagtcataaaattatagtatctcagcaagaaccaagaagacagaaaaaagtcacttcccaaataatatacatagaggagctgtcatggtgctagaatataatgcatctcatctcatctcagtcacttccgaactctaggccttccgcctgccatcgcctgatcaggg

SEQ ID NO: 5448 - DNA, 205 bp, Zea mays
tggcatgctatgtcacttgcgtccccgaactctcaaaaccatgaaaacgggtacttaaacttgaccggcccatccgaatccaggtttggcccatccaaataccactgacgtgaatgctcaaactcgattttaaatgggtcggctaagttccagtacttgttttcctgattttaggagttcaggaaccaagtgacacatcatgcca

SEQ ID NO: 5449 - DNA, 246 bp, Zea mays
gttatgagtacgactgggcgtggacggtattcggtcctccggattttcaagggccgccgggggcgcaccggacaccgcgcgatgtgcggtgctcttccggccgctggaccctaccttcggctgaaccgattccagggttggcgggccgttaagcagaaaagataactcttcccgaggcccccgccggcgtctccggacttcctaacgtcgccgtctgccgccacgtcccggctcgggaaatcttaa

SEQ ID NO: 5450 - DNA, 103 bp, Zea mays
agaagcagttttatgcttcgttgtgtacgaaaagaagggaaggtatttttcaccttcggctcaaaaaatgctagtttcgtccacagcaaagcaattcaatgca

SEQ ID NO: 5451 - DNA, 115 bp, Zea mays
actaaaacttgagcatggcatcataagcattggcattgcatattgttgggggccttcggcttgccagaagcgcctcttctcagccatgatttaacaatgctatctggagtaaacg

SEQ ID NO: 5452 - DNA, 97 bp, Zea mays
caacactgtccaggcttcgttgtctttattcgtttcctcctcctgagcccctggcgtccaatcagcgataaagtctgccagcgcctgtgactgaatc

SEQ ID NO: 5453 - DNA, 86 bp, Zea mays
tttggacccttagctcggcaccatagcctgtggcgccgagctaacatagctcagcgccacagcctatggcgccgagctatgacgtg

SEQ ID NO: 5454 - DNA, 186 bp, Zea mays
gactaaggggtgtttgatttctagggatgtttagtcccatcattttattccattttagtctataaattgccaaatatagaaactaaaatagagttttagtttctatgtttggcaattttggaactaaaatggaataaaatgtagggacaaaaaattagtccctagaaaccaaacatcccctaatac

SEQ ID NO: 5455 - DNA, 187 bp, Zea mays
taaaatttagcccctatcacatcgaatgtttgaatctccgttcggggtattaaatgtagtcggattataaaactaatttctcagccgaagattaaaaagtgagacgaatctagtacagttggttgggtctatatttcatactcctatttgaaagttaaacgcttgatgtgacccgggctaaacttta

SEQ ID NO: 5456 - DNA, 209 bp, Zea mays
tttgccccagctaaaatttagcccctatcacatcgaatgtttgaatctccgttcggggtattaaatgtagtcggattataaaactaatttctcagccgaagattaaaaagtgagacgaatctagtacagttggttgggtctatatttcatactcctatttgaaagttaaacgcttgatgtgacccgggctaaactttagtccacagaac

SEQ ID NO: 5457 - DNA, 217 bp, Zea mays
gtttggttctgtggactaaagtttagcccgggtcacatcaagcgtttaactttcaaataggagtatgaaatatagacccaaccaactgtactagattcgtctcactttttaatcttcggctgagaaattagttttataatccgactacatttaataccccgaacggagattcaaacattcgatgtgataggggctaaattttagctggggcaaacca

SEQ ID NO: 5458 - DNA, 150 bp, Zea mays
tcgagctaacgagctggctcgagctcgtgtcgagctggctcgttaacgaaccgagctgagatgttagctcagctcgtgataaaattgaaacgagccgagtcgagccgagccgagctggccacgagtcgagcgagctcacgagctacgagt

SEQ ID NO: 5459 - DNA, 85 bp, Zea mays
ccgtgtcagtgctagatagcggaccaacagaatcctccacatatagcggatgcagtgatggtcctctattttagcgcacctttta

SEQ ID NO: 5460 - DNA, 140 bp, Zea mays
gtctaagggtctgtttagttcgttacctaacttgtcatactttgcctaacttttccgtctaaggttagttcttcaattcgaacgactaactttaggcaaagtatggcgcagttagccacgaaccaaacaggtcttaaatc

SEQ ID NO: 5461 - DNA, 116 bp, Zea mays
tttgcagccctcacaaaaatgaggatagactccacctgcaggtccaccagataacgttttagttgtgttattgatctgcgggtaggacctatccttatttttgtgaggggctataa

SEQ ID NO: 5462 - DNA, 96 bp, Zea mays
atatccacaggtatggatatggatactatataatatccacgggtaataatttcatgagtatgtatatcggctatccatatccgtcacccaatggac

SEQ ID NO: 5463 - DNA, 134 bp, Zea mays
ggttatatatccgagctcggcgccatagatcttggcgccgagctcggtgccacgttggtgccacggcgtccgggttatgccagcgcagcacgtacctcggcgccatagcttatggcgccgagctgtcgagcaaa

SEQ ID NO: 5464 - DNA, 113 bp, Zea mays
gagctcggcgccatagatcttggcgccgagctcggtgccacgttggtgccacggcgtccgggttatgccagcgcagcacgtacctcggcgccatagcttatggcgccgagctg

SEQ ID NO: 5465 - DNA, 84 bp, Zea mays
gtctggttttgggtcaagtagactcggtctttgagcacacgtcatgctgcaactcgaggacgagctgcttatccaggaggggtg

SEQ ID NO: 5466 - DNA, 140 bp, Zea mays
aatattttcttagggctagtttgggagctcaattttcctaagggattcttattttcccaagggaaaatgaactaatttcccttaggaaaatgaaaatcccttgggataatgtggttaccaaactagcccttaaacattct

SEQ ID NO: 5467 - DNA, 71 bp, Zea mays
ccgagtgtctgaagcactcggcaaagctagaaaaacgctcggcgaagactttatcgagtgtgacactcggc

SEQ ID NO: 5468 - DNA, 213 bp, Zea mays
tcgttattttaagggtgcgtttggttgcaatgacaggacgggatgggacgggacgatccctcaaataaggttgtttggtttaggatcagggattgggacagacctatctcagtgttgtccccaattatccctcaaaattggagggacgagagaggacggcagggacgcccctgtcctggctgtcccgcaaccaaacacaccctaggtttatac

SEQ ID NO: 5469 - DNA, 226 bp, Zea mays
tcgaccagcacctggtggaaccgtcgtcgtcccgctaagtcaccattgtcgaccaacacttggtggaaccgtcgtcgtcctgctaacctcgacccaaaccccagctaccgaccggctcggtgggcggcaactcatgttctactcatggcgatggcgaagacaacagcaggctcgggctctatgtcgcgacttgtgcgactgctgcggtgcgccagggcggggttgc

SEQ ID NO: 5470 - DNA, 185 bp, Zea mays
ttacaagggtgcaagcaaactatctggtccattagattacgatccaaccacagatacaaccatggtttgttaggggcttttttataaagattattgagctgatggtggaagggtttaagtgttaaatatgacctacggttggatcacgatctaatggatcagatggtttgcttgcacccttgcaa

SEQ ID NO: 5471 - DNA, 250 bp, Zea mays
gtatgagcttagcttggcccatgcgagatgatgtttggttgcttgtataaatgcttgatgcatgagcttaaaaactataaagttttattatattttcatgtgatgatgttgcaatagtctataatatgccatacaaagcttaatccacttttaaataatttaactttatttaatagacactaattacatgttaatctgtcattaggaaagactaatggttgcaccggcagagcctggctctggagaaacg

SEQ ID NO: 5472 - DNA, 201 bp, Zea mays
cctctctgggtgcgtttggttgcaatgacagaacgagatgagatagaatgatcgcttaaattaggttgtttagttctgggtaagagttgagacaaaactatcccaatgttgtcctctgttgtccctcaatattggaggggtgagagaggacgccaggggatgtctctgtcctagctgtcccgcaaccaaacatatcatagc

SEQ ID NO: 5473 - DNA, 99 bp, Zea mays
gggtttcattagctgccgactcatccattcacctgccaagaaccatggacaggtctggtcttggtagccgagtgggtggcgcgggagctaaaatcaagc

SEQ ID NO: 5474 - DNA, 129 bp, Zea mays
taatacggagatcagaaagaggccagaggcccaaccctatatcattgtctcgtgtgtttcctatatcgtgcttaagggaagggagacgggttctctgcagcttcttgcgcctctactgagggaaggggg

SEQ ID NO: 5475 - DNA, 209 bp, Zea mays
gtaacaagttgcccgtctagctcagtcggtagagcgcaaggctcttaaccttgtggtcgtgggttcgagccccacggtgggcgatgttatttttttggcggtctgcctcggctgtgtgggtctggtaggctcatttttttgacgtctgggtcgactgtgcgtggcccaattgttattctgcggtctgggcctagtgggctcattctttt

SEQ ID NO: 5476 - DNA, 115 bp, Zea mays
attcgatgcgtgctgtttctctgcaggacaacaatatgaagacagcaactacaactctccaacaataaggtatgttttcctattcctcttagtagaagagatgtactcgtcataa

SEQ ID NO: 5477 - DNA, 116 bp, Zea mays
gccttattttgtctgagcgaagccgtcgccgtgtaagtgaaaccctaaccctaacgctctctcactccctcgtcctctcctctccgtgcggcggctcccagatccggctctcggtc

SEQ ID NO: 5478 - DNA, 82 bp, Zea mays
ccagcacagcggcactatcaagcaggcacggattagctgtcgtatttaatcgtgtcgtgcctgatccatgtcgcgtttgatc

SEQ ID NO: 5479 - DNA, 195 bp, Zea mays
cgcaggaggtccatggcccagactatgatccgagcaccgagccgatcgaccctgatgtgctcatgagggtcgaaggaggcaagagacatgggcggtactggattgccgacggggcaatcgactcgtcctccactcccactgtctcaggtgagagcaaggagcacgggctcgagtccagccatacgacctcggcac

SEQ ID NO: 5480 - DNA, 205 bp, Zea mays
ttttaactagctgaatgcccgtgtgttgcaacgagaatatataataccagtatactacgataacttatatacaaaatgtgtgttataccgttatgagaaaatgtttcataatcaatttgtgattctggtcatacataatttttgttatttataatctatcggtttcaccactatattgcaaccatcagtatcatgcagacttcga

SEQ ID NO: 5481 - DNA, 87 bp, Zea mays
gcaaagggttctttgccgagtgttttttgtcggacattggcaaagactttgacgagtgctaaaaaacactcggcaaaatcaaaatcg

SEQ ID NO: 5482 - DNA, 159 bp, Zea mays
attaaatccacttaaggtcttgttcgtttgtgctggattgatgggtcggattagtttcttaaccggattgcttctctaatttatataaactttgattaactggaacgattccgggtgcaatccgacgtaaacgaacaaggcctaaggctttatttcggt

SEQ ID NO: 5483 - DNA, 154 bp, Zea mays
aaataaagccttaggccttgttcgtttacgtcggattgcacccggaatcgttccagttaatcaaagtttatataaattagagaagcaatccggttaagaaactaatccgacccatcaatccagcacaaacgaacaagaccttaagtggatttaa

SEQ ID NO: 5484 - DNA, 102 bp, Zea mays
ggacgtgatattggcacggctcaatcagagagcagagccccaccccccctggcctctgctagggctcgagctctcgaattgaaccgcgtcaataccccgtct

SEQ ID NO: 5485 - DNA, 97 bp, Zea mays
tgccggattagtgggtcgggacgattcttagctggattgcttctctaatttatataaactttgattagctggaacgattccgtgtgcaatccgacgt

SEQ ID NO: 5486 - DNA, 173 bp, Zea mays
tagcccttatcacatcgaatgtttgaacctccgttcggggtattaaatgtagtcgaattataaaactaatttctcagccgaagattaaaaagtgagacgaatctagtacagttggttgggtctatatttcatactcatatttgaaagtcaaacgcttgatgtgatccgggcta

SEQ ID NO: 5487 - DNA, 254 bp, Zea mays
gttaaatttcgcaatttgggagtgaagttttttcacaaatttgaaaaagaatactgcattattttcaaatactgcagcatctgtatacagcatgctagttaaaatatcggttttaaaaattaaagtattgtaaatattgtagttgttttaaggtatggtttagaatactatggtatttttaaactgtggtattgtcatgagtaaagtatactgtagtatttcaaaaactttgttcccaaacagtgtctaagaga

SEQ ID NO: 5488 - DNA, 149 bp, Zea mays
atggctgcttaaggccttgttcgtttgggtcggattacacccggaatcgttccagctaatcaaagtttatataaattagagaagaaatccggttaggaatcgttccgacccagcaatccagcacaaacgaacaaggtctaaaggggatc

SEQ ID NO: 5489 - DNA, 197 bp, Zea mays
agcaaacatgtctctctgttgggccctgacgctatcaagggtgctgtgaacggtggtgactgccagaaagaaggaaacggtgctgagccagatagtacagcctcagaacccgaggggatcaaagacgttgaggatgagccctcaaacaaacgccaaaaaaccagcgacggcgaaccagcaagcgaaccttgatttgt

SEQ ID NO: 5490 - DNA, 81 bp, Zea mays
tcacaagcggtttttgtttaggaccgcatgtggttctctatcattttcacaagcggaccctaagacaaaaaccgcctgtga

SEQ ID NO: 5491 - DNA, 185 bp, Zea mays
aaaatttagcccctatcacatcgaatgtttgaacctccgttcggagtattaaatgtagtcggattataaaactaatttctcagccgaagattaaaaagtgagacgaatctagtacagttggttgggtctatatttcatactcctatttgaaaatcaaacgcttgatgtgacccgggctaaacgct

SEQ ID NO: 5492 - DNA, 149 bp, Zea mays
aggaattcataaggccttgttcgtttgtgccggattagtgggtcgaaacgattcctaaccgaattgcttctctaatttatataaactttgattagctggaacgattccgggtgcaatccgacataaacgaacaaggcctaagtcggaac

SEQ ID NO: 5493 - DNA, 68 bp, Zea mays
gtgccacacattgcctaaggttagtcgtttgaattgaataactaaccttaggcagaaaagttaggcaa

SEQ ID NO: 5494 - DNA, 249 bp, Zea mays
  unsure (128): n = A, C, G or T
gacattatcagcgtgattggttgactgggtgcgcagcgccagtctccggctagcccggaccgcgggatacgcaggatatgcgcgtttccgcgcatgcaggcaatcaagccaaaaaaaagtctatgctncatgtgcgtgtacaggctgccaccctcctttccggttaaccaaacagaagctgcgcaaggtcaacgggacgccgtgggtctggatgcagccggccaaccaaccaatcacgtagtatgtctt

SEQ ID NO: 5495 - DNA, 143 bp, Zea mays
atccttagttttggcacagacctcattgctatccttagttttcaaacgacctcaatcatacctgttggaacttgctttcaagcgcaaggaggccaacaagggtgaacagtgatgacaacagggttccgtgctaggaggcaata

SEQ ID NO: 5496 - DNA, 172 bp, Zea mays
acgggaggacccagggcgccgccgtcggcgacatgacccagcgccttctcctcgccctctcgctcatcgcatcagcgaccgccgtgcccgctgtcatccgcacggtcccggacgaccccaccgcgggctcctctggcgcggcagacgccgcggacgcgctcttctgtgacag

SEQ ID NO: 5497 - DNA, 127 bp, Zea mays
ccatcttcccagtcaaccgttccaccgccagcatcatccgctcccagcgctcctcccctttttgctcggtccccgccattgcttccaggatcagccgcgtctgaacggatggcttcgtggaaggcgc

SEQ ID NO: 5498 - DNA, 82 bp, Zea mays
ggcacggcacggcccataattagatatgtgcttttgtgggccgtacctttgtgggccgtgcttttgtgggcctgtgccgtgc

SEQ ID NO: 5499 - DNA, 224 bp, Zea mays
atctgtctcttaggatgtgtttggttgcgggacaacttaggacagacaggacaggtacattcccttgtgtcatttctcgtacttccaatttagaggtacaattgagaacaacaatgaaatagttatgtcccaacacctgaccctgaatcaaataaacttatttaagggaccgtactatcccatcccatgttgttattataaccaaacacatccttagatatcaa

SEQ ID NO: 5500 - DNA, 84 bp, Zea mays
agtgtcaaggccatagcactcggcaaaagaaggaacatttgggcaccgataaagcctctttgtcgagtgctacgaccctgacac

SEQ ID NO: 5501 - DNA, 71 bp, Zea mays
tgcctaactttttctgcctaaggttagtcgttcgaattgaataactaaccttaggcaaaaaaagttagaca

SEQ ID NO: 5502 - DNA, 168 bp, Zea mays
gacggcgatagagactttgccgagtgtgcccgtgacacttggcgaaggcttactctttgccgaatgtctactgtcacagcactcggcaaagaagctccccgtcgacacctttgtcaatacctgtgctgagtgtattaggaggcactcggtaaaggttctatctttgcc

SEQ ID NO: 5503 - DNA, 209 bp, Zea mays
gttacaatccgacacaaacgaacaaggcatcaatctcacccaatacacatggattaacggtaaaacgaacaacttggaaatgattttttttttcatctccatatggtgacaatgttggactcgattgaaaggtcgcactattcgtttcgctatttcctgtgataaatcaaatgttttcctcattggctttgctgtttgtcaccaacaaa

SEQ ID NO: 5504 - DNA, 98 bp, Zea mays
tcggtaaaagaaaacactcggcaaagaagctctttgccgagtgtcaaaaatataacactcgacaaagagcttctttgccgagtgctttttttttcaac

SEQ ID NO: 5505 - DNA, 99 bp, Zea mays
gttgaaaaaaaaagcactcggcaaagaagctctttgtcgagtgttatatttttgacactcggcaaagagcttctttgccgagtgttttcttttaccgag

SEQ ID NO: 5506 - DNA, 99 bp, Zea mays
tgttgaaaaaaaaagcactcggcaaagaagctctttgtcgagtgttatatttttgacactcggcaaagagcttctttgccgagtgttttcttttaccga

SEQ ID NO: 5507 - DNA, 177 bp, Zea mays
tatcttttttgtttccgttccatagctatctggattcagtttttgttttattttatgaatgcagccaatgaccagtgctacagaaggcaacttcttgtgctctctagcataatggttaaggcttccgagtagcacctccagaggccgtagagatggcaatggggacccgatccctga

SEQ ID NO: 5508 - DNA, 140 bp, Zea mays
gattaagggtatgtttagtttcctggctaacttgtcacactttgtctaacttttctgtctaaagttagttcttcaatttaaacgactaaccttaggcaaagtttgacgtagttagccacgaaccaaacatgctataaatc

SEQ ID NO: 5509 - DNA, 158 bp, Zea mays
agtatgatcttgttaaggccttgttcgtttccgtcggattgcaaccggaatcgtttcagctaatcaaagtttatataaattagagaagcaatccggtcaggaatcattccgacccaccaatccggcagaaacgaacaaggcctaaacgattaccgatt

SEQ ID NO: 5510 - DNA, 148 bp, Zea mays
gtaatcgtttaggccttgttcgtttctgccggattggtgggtcggaatgattcctgaccggattgcttctctaatttatataaactttgattagctgaaacgattccggttgcaatccgacggaaacgaacaaggccttaacaagatc

SEQ ID NO: 5511 - DNA, 255 bp, Zea mays
  unsure (164)..(165)..(166)..(167)..(168)..(169)..(170)..(171)..(172)..(173): n = A, C, G or T
tagctggcgcatccaggaggcctcggccacgccgttggccacaacgcggtactcgacctctgcactggagcgggagacgacgggctgccacttggcggcccaggagacaaggttggcgccctggaacacgacatagcccgaagtgcaccggcacggtcggcccnnnnnnnnnnaagaactcatcgcgccagccgggtgtagctgttgttggcgaggtcgaggacgacgtgaacgagactccggatgttttgcaca

SEQ ID NO: 5512 - DNA, 89 bp, Zea mays
ggtatatgcctgtgcgttgcaacggagacatataatacataagttaccgtgatattatatgtccccgttgcaacgcatgtgcactcacc

SEQ ID NO: 5513 - DNA, 132 bp, Zea mays
attattagggctgatttggtgacccgggattctgggaggatcggagggaattgaggaggaaattagtttatttccccctcaatcccctccaatcctctcaggatctccttgtcaccaaatcaacccttaaag

SEQ ID NO: 5514 - DNA, 182 bp, Zea mays
aatttgctgcagcccggcagcaaaccaggatctttacagcccctcacaaaaaagaggatagacctcatgcgcaggtcaataacacaactaaaacgttacctggtggacctgcaggtggggtctatcctcctttttgtgagggactgcaaacctcctggtttgcagccgggctgcaataaagt

SEQ ID NO: 5515 - DNA, 126 bp, Zea mays
ggccgatttggttcgtgattaaatgtgtcacactttacttaaggttagtcgtccgaactgaataactaattttagactgaaaagttagacaaagtgtggcaagttagacagtgaaccaaacatgct

SEQ ID NO: 5516 - DNA, 117 bp, Zea mays
atactaggctgttaggaggggacgggggaggtcaaacccaacgtacatcatgagtggagctgctgtaatgtaacagaagtattgcaccccccccccccccccccaataatatataac

SEQ ID NO: 5517 - DNA, 153 bp, Zea mays
cccactcgcttagggctagtttgggagtcataaaatcggatggaattagaggggccagaatcccctttttatttagattttaataaaaagaggattttgtactctctaatcctctccgattttgtgtcttccaaactggctcttagagttgtg

SEQ ID NO: 5518 - DNA, 196 bp, Zea mays
aaaatcataagaactctcttgtaacgaccgagaatcccaccgtagtaataaatttagagcacagataacacatgttatgataatttaaccttgctattttaacaggaattagccttgcaaccttcaaggctatgtctaagccatatattatactaggtgtatgcccgtgcgttgctacggagtcaacatgtattgt

SEQ ID NO: 5519 - DNA, 201 bp, Zea mays
atcactcatttggtgcaagcgtgcaaccaaaccatcccagagcattcaatctagatccaacgatttcatatgaaaggggttaaaagtaaaataggtactatgtttcaggtggaaggggttaaatgtaaaataacagtcatcattagatctagattagatgcaccaaatcgtttgattgcacgtttgcaccaatataaatga

SEQ ID NO: 5520 - DNA, 190 bp, Zea mays
agttagtgggtgtttggtttatagggactaaacattagtccctccactttattctattttagtttataaattgttaaataaggaaactaaaatagagttttagtttctatatttagtaaattagggactaaaatggaataaaattgagggactaaaaattagtccctagaaaccaaacaaccccttagtt

SEQ ID NO: 5521 - DNA, 150 bp, Zea mays
tacaagcataaggccttgttcgtttacatcggattgcacccggaatcattccggctaatcaaagtttatataaattaaagaagcaatccggctcggattcgttccgacccatcaatccgacacaaacgaacaaggcctaaggatgctttg

SEQ ID NO: 5522 - DNA, 148 bp, Zea mays
aagcatccttaggccttgttcgtttgtgtcggattgatgggtcggaacgaatccgagccggattgcttctttaatttatataaactttgattagccggaatgattccgggtgcaatccgatgtaaacgaacaaggccttatgcttgta

SEQ ID NO: 5523 - DNA, 205 bp, Zea mays
tcaccgtgcccagactttcaacgtgtgttgaccgcgtccaatcctgttattggtttcctgcatcgtcatccgcaagtctggatgagcgcatgcaactttagttcttttacccgttgggtcttgcatgtgtggagaagcatgtgagggtcttcactagcgatgtaggcttgcgcgaggccggcacacgtggacgcggcaaccaatc

SEQ ID NO: 5524 - DNA, 87 bp, Zea mays
cgcctcgggctcgcttggtgcagatcgggacccgccgcccggccgacgggacggatcccgccttgcaccaagtgaatcggagccggc

SEQ ID NO: 5525 - DNA, 92 bp, Zea mays
cgccggctccgattcacttggtgcaaggcgggatccgtcccgtcggccgggcggcgggtcccgatctgcaccaagcgagcccgaggcggcgc

SEQ ID NO: 5526 - DNA, 110 bp, Zea mays
tggttggtggctaaatctgccacactttgcctaaggttagtccttcgaattgaaaaactaaccttagacagaaaagttaggcaaagtgtggcaagttagacaccaaacca

SEQ ID NO: 5527 - DNA, 235 bp, Zea mays
cgtggaccctagctcggcgccgcaggtcatggcaccgaactcgcaagaatacaatagcaaccatttaaagtttaacgtcgttctattctgtttcaggtcttaacaataggtatcaacaaaataataatatgttttctcttttctaatggctactatctcaccttcctaattgagcaagataaatcttttgtggtggacgaaaaccaagatctatggcgccgagctcgtaaaaata

SEQ ID NO: 5528 - DNA, 150 bp, Zea mays
tagatatccctgaggccttgttcgtttgtgccggattggtgggttggaacgaattctaaccggattgtttctctaatttatataaactttgattagcgggaataattccgggtgcaattcgacacaaacgaacaaggtctgaccttagta

SEQ ID NO: 5529 - DNA, 123 bp, Zea mays
acggtgactgagcctttgccgagtgtcaggccagcagacactcgataaagggagctccagtgggcccccacgccaatttctgcgtcgagtatgcggcctagcactcggcaaagaaggagcctt

SEQ ID NO: 5530 - DNA, 100 bp, Zea mays
ggatgctggccagcatgcggtcgtgcacgctagaactatttttcactgcccgcctgcacgtgtggagatggcgctgatgaccgtcgctgaggagccaggc

SEQ ID NO: 5531 - DNA, 214 bp, Zea mays
aatattgtctaagggtgcgtttggttgtaatgacaggacgggatgggacgggacgatccctcaaataaggttgtttggttcagggtcaggggttggaacagacctatcctagtgttgtccttagttatccctcaaaattggagagacgagagaggacgccaggggacgtccctgtcctgactgtcccgcaaccaaacacaccctaaattgacca

SEQ ID NO: 5532 - DNA, 105 bp, Zea mays
tgtttgggaaaaactttggttgagaccaatcagccagagcgggacctagctggcgctctctttacagagaaaaactttggttgagaccaaagtttccaaaactgc

SEQ ID NO: 5533 - DNA, 204 bp, Zea mays
acataacacttagggctagtttgggagcaaaggaattgagggggtatgaagggaattttagccccccccccccaccgtgaccatggaattggagaggatccatggggaggaaatccctcatggatcccctcgaattccctggtgaccaaatcagccttgatcccctccaattctcttgctctcaaactagcccttatgggtcca

SEQ ID NO: 5534 - DNA, 85 bp, Zea mays
cccagatgccacagcctaaggttaggcatgccccatttttgtcggtaagtgtttggttcatgcctaatattaggcagccacgaaa

SEQ ID NO: 5535 - DNA, 136 bp, Zea mays
ttaagggcatgtttggtttgtggctaattatgcctcactttgtctaaggttagtcgtttaaattgaataactaatcttaggcaaaaaagttaggcaaagtgtggcaaattagatagcaaaccaaacaggccctaaa

SEQ ID NO: 5536 - DNA, 112 bp, Zea mays
ctgcttcggtagccaaggatgagctgcctgtggcctcctgctgcggacgttgcgtggccccgcctccaccgcgtgcggtccccgcaggcagcctccttggctagtctgagcg

SEQ ID NO: 5537 - DNA, 137 bp, Zea mays
agtctgtccagatagccaaggatgacttgcctgtggcttcttggcttggcttggctcgggcaaaaccttgtgcacgttttattgctcgcctcgtggcctcgatcacaggcagtctccttggctagtccgggcgggcc

SEQ ID NO: 5538 - DNA, 75 bp, Zea mays
gccacacgcgtgctcgctcgtgtttcgcattatttatcgcgtgacttgtgacttgcgacgatgcgcgatcgtgac

SEQ ID NO: 5539 - DNA, 215 bp, Zea mays
tagtgtatcccctactttttcatctcccgcagtggtttcccctaaatactccccctatatcccactacaatataaaatatcattttctatacctacttttcatctactatcaatttttcttctactattaattgaaggcgggcccacaggaacagtggtagggggagagcgcgcgtgcgctgcagctgaggggagagagaagagtcccgcgcggt

SEQ ID NO: 5540 - DNA, 148 bp, Zea mays
gatgtatttcgggcatgtttggtttgatgactaagtcgccatattttgtctaacttttctgcccaagattagttcttcaattcagacgactaaccttaggcaaagtgtgacacggttagccacgaaccaaacaagcccttcatgtcca

SEQ ID NO: 5541 - DNA, 137 bp, Zea mays
gcgattgagggctgatttggtgaccagagaatcgaagggatccataggagaggaatcctcttgctattcaaaccaaggaaatctcttgctattcaattcacttgaattccctgctcatcaaactagcccttactact

SEQ ID NO: 5542 - DNA, 142 bp, Zea mays
gacatcgatctcatctaaaagtttcttctcaatacataaagtggccaagccattcagtcgttcttgtgacattgtagaccttaaataattctttaataattttaatttcgagaagctcctttcagctgatgccaccgtaaca

SEQ ID NO: 5543 - DNA, 158 bp, Zea mays
ctaatctaaacagctccacaccctcctggacaaaagagcggcagcacacggattgcaagcgactcaaatcaaagctgaccaactaacgtcacctctccgcctccgcgtatcaagaccccggatcgtttaggatgtgtttggttgcctgatccagcctg

SEQ ID NO: 5544 - DNA, 93 bp, Zea mays
taaaaaaggaggattgaccctacctgcaggtccaatagataacgttttagttatgttattgctgctgtagataggctcaattttttttatgtg

SEQ ID NO: 5545 - DNA, 86 bp, Zea mays
cgggcgggtgggtggcctaccctcaccaagaccaaccacgtcgagtgggccgtgggtgatgagggtacggctccaggttcgccaca

SEQ ID NO: 5546 - DNA, 228 bp, Zea mays
gtttagcggtacaagtaaggccgcaacggtatcctgtaacacctcctgtacattttcaggctagagacctctcctccaaatgtgcaggcgttgtctcgtcctccaaatcatctcaaggtggccgcatccatatcccgagcgacgacggccgatcttcctcgtgcatgtgttcccaagcgacgacggacgatgtacttgccgcagcagccatggttcgtcgaccgttga

SEQ ID NO: 5547 - DNA, 138 bp, Zea mays
tctagtttgggagtccaaataccggagaggatcggagatgattgaaggactaaaattcatccttattaaataaaagtaaagaaatgaggggatttgagcccctccaatccccttcgattttgtggctcccaaactaac

SEQ ID NO: 5548 - DNA, 76 bp, Zea mays
tgccgttgcaacgcacgggcactcacctaccttatataatacactaggtgagtgaccgtgcgtcataggcccgagt

SEQ ID NO: 5549 - DNA, 98 bp, Zea mays
tcgtctgtcccacgccaaagcacaggtctaagactcagcccggtcgtggtcgttctcacatgggcttcgatgccgctgtgtatgggtggggtaggggt

SEQ ID NO: 5550 - DNA, 134 bp, Zea mays
tccttaaggactgatttggtgacccgggatcccgagaagaagaaatcctcttgctattcaaaattgaactacaagggaatttctcccccatggttccccttgggatccctaatcaccaaatcagccctaaggta

SEQ ID NO: 5551 - DNA, 164 bp, Zea mays
atactttttaggggttaggttgggctggagaagtccgggggcttttatgaaaaagtccttcgcagggagaccagaccattgttttgggacgcacattggaacacggggcatttacctcatatttaggctattttcgtctaacctcaatctcattcattactagg

SEQ ID NO: 5552 - DNA, 112 bp, Zea mays
tggttcgtggctataactgtgccacactttgcctaaggttagtcgtccgaattgaaaaactaaccttaggcacaaaaattaggcaaagtgtggcaagttaggcagcgaacca

SEQ ID NO: 5553 - DNA, 124 bp, Zea mays
ttactcgatcgcgcttggaatcgcacggggcctggcttatctgcacgagggttgcgttgatggtatcgtgcactgcgaatgcgatataaagccagactagtcggttgtccgtgcgttgcgacgg

SEQ ID NO: 5554 - DNA, 75 bp, Zea mays
agtgaggagcgagaagacgacggagtcgctcatttgtagggatgctgtgctctgtttgttttcttatctgcttaa

SEQ ID NO: 5555 - DNA, 73 bp, Zea mays
ctgctttgtctcgcgagctaaacgagccgagctagactaactctgtggctcattagctaaagggatttccctt

SEQ ID NO: 5556 - DNA, 193 bp, Zea mays
acgagtcgtgcgctaatcgtgtcgtgccagggccgtgtcggaccgggccgctcgtttggacatatatacttgcagctatagttgaccaaacgaacagcccaacatgactcggcataggcccgttagcctgacagctaatcgagtcgtacccgatcggcccacgtgccacagacgcggtctaggcatgatatgt

SEQ ID NO: 5557 - DNA, 141 bp, Zea mays
gtaaatggttctgtccgctaaatctaggggtcagcgacctcctgcatcctgctccgatgaccgcggacggcctgaggctgtctccagcaacgaaccctaaatggtcctgtactctaaatttagaggatgagacgtccacta

SEQ ID NO: 5558 - DNA, 122 bp, Zea mays
tgaggggaatgaagcctggtccgagatcttgtagatctgaggaacaaaaaaaactacacatgcaagcatggatcatcctcaaatcggaaagcaagaccttgaaccagacaacattccactca

SEQ ID NO: 5559 - DNA, 143 bp, Zea mays
ggtagacgattagggctagtttgggagttagaaaaccggagggaattggaggggctaaattccccttgttatttaattttgaatgagaagggaaatttagtcgctctgattttgtggctcccaaactaactcttagcttttgc

SEQ ID NO: 5560 - DNA, 106 bp, Zea mays
aggtcagaaagtatagtccgcctatttccttttcctatatatatatatattattctttaaagccggttagaaacggagatgctagggctatccacgtcgacagaaa

SEQ ID NO: 5561 - DNA, 138 bp, Zea mays
aacgggacgtaatttcggatacggatacgggtattttgtttgtcgggacggatacgggtattacccggatattgaacctcggatacgggtaggatacggaatcactaatacccggtcagtacccgaaaatcccggatc

SEQ ID NO: 5562 - DNA, 226 bp, Zea mays
tagaacggtagaatggacggctgagatcgcagaatggcagaacaccaaaaaaggcagggctactatagctaaacttaataagtagtaggagatatataatttttcagacaaatacccaatgcacataatcttgtttcagggtgtctcaaatgagaacaaaaaactgaaaagggatttggtgaaggactgttttgtacttttgtttctcaacttccaaagagctttg

SEQ ID NO: 5563 - DNA, 136 bp, Zea mays
atagacttttaggccttgttcgtttgtgccgaattggtaggtcggaacaattcacttctctaatttatataaactttgactagctgaaacgattccgggtacaatccgacataaacgaacaaggccttactgggtg

SEQ ID NO: 5564 - DNA, 134 bp, Zea mays
ggtcaaattaacttgctagaggccaactggatcgtacctaggggctacagtaagccgtaggaagttagtcagctggcggcgtgaacctactaacttccgagaggcaccgttgggcgctggctgtaggaagttag

SEQ ID NO: 5565 - DNA, 115 bp, Zea mays
ttagattaaagctgtttggactgctgctagagactgattaaagtcaagcggagcgaaacgtttctgcctggcatgcatggtctccggcagtgctatcaatgcagcctcctgaatc

SEQ ID NO: 5566 - DNA, 126 bp, Zea mays
ggcctgtttggttcgtggctaactacgccacactttgactaaggttagtcgtttaaattgaagaactaaccttaggcagaaaagttagacaaagtgtgacaagttaggcagggaaccaaacatgcc

SEQ ID NO: 5567 - DNA, 148 bp, Zea mays
tttgtcgataaggccttgttcgtttctgtcggattgatgggtcggaacgattcctaaccggattgtttctctaatttatataaactttgattagttggaacgattccgggtgcaatccgacacaaacgaacaagccctaaatgaaatc

SEQ ID NO: 5568 - DNA, 215 bp, Zea mays
ggtcttaggatgcgtttggttgcaatgatagaacatgataggatagaattatttctcaaataaggttgtttgattcagaattaaggattggaatatgattatcacagtgttgtctccagttgtccctcaaaattggagggacaaaagaggatgttagaggacgtctctatcctggttgtccctagttgtcccgcaaccaaacacacctagtgttt

SEQ ID NO: 5569 - DNA, 176 bp, Zea mays
ttttactaggttattgggttcgagttctgttttcccgtaccatactcacatacccaatggggaaagaatttctaccaaatccatatttatgtggattaaaatcttctcataccctaaccctaatagagaaattctccatgagttaacggctatcgggtcccattgacacctctaga

SEQ ID NO: 5570 - DNA, 177 bp, Zea mays
aaatttagcctctgtcatatcgaatgtttgaacatccgttccaggtattaaatgtagtcggattataaaactaatttgtcagccgaagattaaaagacgagacgaatctagtggttgggtctatatttcatactcctatttaaaagtcaaacgcttgatgtgacccgggctaaattt

SEQ ID NO: 5571 - DNA, 162 bp, Zea mays
ttaggttatttctagattaaaatcaacagaaaatgtctaaattcctatcggacacgtcctcaatataatgtttacagtagaaccatggtgctgcgggttaggattgttgatccaattttggttgagtgacagctgtttttttttcttttagaaaatttaaag

SEQ ID NO: 5572 - DNA, 86 bp, Zea mays
attaccggaatcgcgttctttgccgagtgtctaagacactcggcaaaggctattttacactcggcaaagagctaaattccgatagt

SEQ ID NO: 5573 - DNA, 244 bp, Zea mays
ggttcgttgcctcagttgccacagtttgccacgcctaagttcatgcaagtttgactgagttaggcatgtgtttggtttatagccacaattgtggcaagatttttctcctgctgcgtaggtcccacttgtcaatgacttgtaaaagcgtgtcagattcccttaggcatgccacagttgtggcgcagaatttgagcgcctaaccttaggcaagtgtgacaatttttggcaccttaggcaggaaacc

SEQ ID NO: 5574 - DNA, 142 bp, Zea mays
aggagagggagctgacagaaagagaagtgagcacgcaacagcagctgcgccttggcatctatccattcgccaggagcagccgtatatagatgcagtctggccgatgcgtgctcactctcttctgtcagccacaccgtcgagc

SEQ ID NO: 5575 - DNA, 92 bp, Zea mays
ggccctagaagtcgttggacataagcttatgtccgactgcttgcttggaagctgtcagacataagcttatgtccgacggtggctagagcccg

SEQ ID NO: 5576 - DNA, 248 bp, Zea mays
tctgatgattgcagtcagacataagctatgttcgacagtctctaagagccttcggcaattaaatctgcttacgaccataacaatgaccagtgggccccacatggttatgtccgacggcctcgcatgagcgtaagagctgtgatagtggaatggcgtgggcacgtcgttccatatatccagtgacgtccaacggtcgggccctagaagtcgttggacataagcttatgtccgactgcttgcttggaagc

SEQ ID NO: 5577 - DNA, 108 bp, Zea mays
gatgatccatgctgatttggtgaccagggatctatggggaggaatccccttgctattcacccatggatcccctcgtgatccctggtcaccaaaccagccctaaaggtt

SEQ ID NO: 5578 - DNA, 182 bp, Zea mays
ttcagttgctataggctatgacgccgagttaacacagaacggcggcgacgcggcgggaagaggataacggcggtgtggcatgagaagatctatggtgccgagctaggggtcacgtcggcttgcacgtcaaccctagccgccgtcgtcacgtaagagctcggcgtcataggccatgacgccga

SEQ ID NO: 5579 - DNA, 163 bp, Zea mays
actttaacaaaagacaaagggcctgtttggttcgtgactaactgtgccacattttacctaaggttagtcgtccgaatcaaagaactaacgttagacagaaaagttaggcaaagtgtgttaagttagtcagcgaatcaaacatgccctaagtctctatattatt

SEQ ID NO: 5580 - DNA, 98 bp, Zea mays
gaaaaatattcttgcaggtagaagccatctttccttaggataacccctgagctaggccttattgcaaaagacaacttctatccacaagatctaagcag

SEQ ID NO: 5581 - DNA, 139 bp, Zea mays
ttcattcctttagggctagtttgggaggtccatttttccaagggattccaattttccaaagggaaaatgaactaattttccaaagaaaaatgaaaatcccttgggataatggggttcccaaactatcccctccaatcct

SEQ ID NO: 5582 - DNA, 161 bp, Zea mays
  unsure (71)..(72)..(73)..(74)..(75)..(76)..(77)..(78)..(79)..(80): n = A, C, G or T
gttttcgctggcgcgggcggcctttgcgggattgggggaagcggcggcgtctgggggcgcgtgggcgcgtnnnnnnnnnnacacggcgggtcgtgcggcaggtcgtgcggtggatgcggccgttgcgggcgtgcgagattcgctggcgtgggcgtgcggga

SEQ ID NO: 5583 - DNA, 149 bp, Zea mays
caccagcacctggagcgcgaccatctgctggcggggagggggggggggcttctgttgaaattccttgtccccatcgtgctccacgccgacaaacgaacggggcgcgcctggagctctactcagcagaggaggcagcacgggagcaggag

SEQ ID NO: 5584 - DNA, 176 bp, Zea mays
gagagaggggcacgcacgcagggtcaccggccggtgtgcggaggatcgaaggcgagggcgcgaggctgaagggaagccgctgacgccgtcgctgagatcccgagcctgggcgccgtcgctgagatcccgagcctgagcgccgtcgctgagatcccgagcctgagtgccgccgccgc

SEQ ID NO: 5585 - DNA, 149 bp, Zea mays
ctattaggataaggccttgttcgtttgtgttagattggtgagtcgaaactattcctaaccggattacttctctaatttatataaactttgattagctggaacgatttcggatgcaatccgacacagacgaacaaggtctaaaacataaa

SEQ ID NO: 5586 - DNA, 149 bp, Zea mays
cagccagctttaggctatctccagcaatctacccatccccgtacctatattcaaactatagtctgtgaatagtgtggtctaaaataatgcagaacacagtgcttttggtgatcatatgggttaattactggatacagtcttatatcagc

SEQ ID NO: 5587 - DNA, 153 bp, Zea mays
ccgctgcaaaccagactgtttgcagcctctcacaaaaataaagatagatcctatctatagatccaccagataacattttagttgtgttattagcctgcaggttagatttatcctcctttttgtgaggggctgcaaacagcctgctttgcaggc

SEQ ID NO: 5588 - DNA, 150 bp, Zea mays
cctgcaaagcaggctgtttgcagcccctcacaaaaaggaggataaatctaacctgcaggctaataacacaactaaaatgttatctggtggatctatagataggatctatctttatttttgtgagaggctgcaaacagtctggtttgcagc

SEQ ID NO: 5589 - DNA, 153 bp, Zea mays
cgctgcaaaccagactgtttgcagcctctcacaaaaataaagatagatcctatctatagatccaccagataacattttagttgtgttattagcctgcaggttagatttatcctcctttttgtgaggggctgcaaacagcctgctttgcaggcc

SEQ ID NO: 5590 - DNA, 140 bp, Zea mays
gtcgtccgactaatcgcaattaatcacgattagtcgggttggtcggtaattagtacacgatttgctggacgactcgaccagacaacctagtcgtcctggtcgtccgactaatcgtcgactagggcgactagtcgtccgac

SEQ ID NO: 5591 - DNA, 152 bp, Zea mays
gaactagccttagggctagtttgggagcaagaaaactgaaggagattgaagtgtctaaaattaatgtcttattcaaaattaaataaaaagggaattttagctcctctaattctctccggttttcgggcccccaaattagtccgagaaatatt

SEQ ID NO: 5592 - DNA, 78 bp, Zea mays
gtcgactgacaggaccgaccaggcgcctaatcgcgattagggcgacggttaggtcgactagtcggttccggtcagcct

SEQ ID NO: 5593 - DNA, 87 bp, Zea mays
tcacctaacacactcggcaaagaacactcggcaaaggggccaccagcgggtccctttgtcagtttctttgtcgagtgttttaggagg

SEQ ID NO: 5594 - DNA, 230 bp, Zea mays
aaaatgacgtatgacgaccgttgaaactggtgctttaagtatagtatagatataacatatgctgttttggtaaagtggaggaaaggcgagtagaggcggctgacgaggtgacgcgtgcgtgcgtggcgtccagcgtccccctcccccgtctctctccctttctctctgcagtctgcacgccaaaaaaaaaaaagtcttcagccatctcgacggctcgtcggctcgaccac

SEQ ID NO: 5595 - DNA, 112 bp, Zea mays
tggttcgtggctaactgtgccacagtttgctcctaaggttagtcgtccgaattgaagaactaaccttagacagaaaagtcaggcaaagtgtggcaagttaagcagcgaacca

SEQ ID NO: 5596 - DNA, 141 bp, Zea mays
actaagagcatgtttggttcgctgcttaacttgccacactttgcctgacttttctgtctaaggttagttcttcaattcggacgactaaccttaggagcaaactgtggcacagttagccacgaaccaaacaagccctaaata

SEQ ID NO: 5597 - DNA, 145 bp, Zea mays
ttcccctaaaggcttgttcgtttgtaccggatttatgggttggaacgattcctaatcggattgcttctctaatttatataaactttgattagctggaacaattccgggtgcaatccgacgcaaacgaacaaagcctaaaaaatac

SEQ ID NO: 5598 - DNA, 236 bp, Zea mays
taggtgggtgcccgtgcgttgcaacggaaacatttaatatcatgacaacttatgaacaaatgtgtgttatactgttatgtgaaaatgtttcgtaattaatttgtgatcctagccatacataaattttgttatttcaatctaactatttcatcactacattgcaaccaacagtaccgtgcagacttctatacatgatagctgaatgcccgtgcgttgcaacgggaatatataatacc

SEQ ID NO: 5599 - DNA, 211 bp, Zea mays
gaggtgacgaaggcctggagcgaagggtagcgtcttctccttcgccccaacattttgccctccgagggaccagttcgactgagtcatctagtgccgaagacgtcactagatggtggagacgttgccctcgctcgaagtggttccacgggggtttttgatgtgactgttgatggacgtggtactgttggactgcgggtttcccgaagcgtcg

SEQ ID NO: 5600 - DNA, 126 bp, Zea mays
gctagtttgggagtccaaataccggaggggattagaggggctaaaatcccctccttatttaaaattgaataaggaggcaattttatcccctccaattccctttgattttgtggctcccaaactagc

SEQ ID NO: 5601 - DNA, 234 bp, Zea mays
gctggtgccgctgtgagtgcgacgacgacggggtgggaggtggtcggggatacagaggaggaggagcaggaggtcgagatggagacggtgcggtgggcgatggaggtgggcgtgtgggccaggtgcctcggcgttggcctcctcgcaacggccaggcgcttccggcggaagcgcaccttctggtgaccgctggcactttctctgggtcggtgtggggctgttggggcatcgcgc

SEQ ID NO: 5602 - DNA, 239 bp, Zea mays
gggtattgttgtgagccgtcgcaacgcacagataaccgaccagtatatgtttaattgactagttaggcgtgaatgtaggtttagagccatcatgattcaaatcccaatttatatataactttagcttcttttactatttaaatgtgggggacacaacaatgatgtattcgtggaatcagaaaaaactgatggtttaatatagtcgtgctcatgcgttgcgatggcacacaattatattt

SEQ ID NO: 5603 - DNA, 246 bp, Zea mays
ttaaatataattgtgtgccatcgcaacgcatgagcacgactatattaaaccatcagttttttctgattccacgaatacatcattgttgtgtcccccacatttaaatagtaaaagaagctaaagttatatataaattgggatttgaatcatgatggctctaaacctacattcacgcctaactagtcaattaaacatatactggtcggttatctgtgcgttgcgacggctcacaacaatacccacgta

SEQ ID NO: 5604 - DNA, 137 bp, Zea mays
cactcaataaaaaaacactcggtaaagagttttttgccgagtgtttttttacactcgccaaaaaacttcttttgccaagtgttgttttttttacacttggcaaaaagcttctttgccgagtgttttttaacaatatg

SEQ ID NO: 5605 - DNA, 118 bp, Zea mays
gcactgctctggtagccaaggatgacttgcctgtggcctccatcagtcgcagaggacgctgttcttctgcttgtggttgtcgatcgcaggcagtctccttggctagcccgagcggctc

SEQ ID NO: 5606 - DNA, 152 bp, Zea mays
tttttctccctgaggccttgttcgtttatgtcggattgtaaccggaatcgttccaactaatcaaagtttatataaattagagaagcaatccggttaggattcgttccgacccaccaatccgatagaaacgaacaagggctgagtttgaaggc

SEQ ID NO: 5607 - DNA, 256 bp, Zea mays
tgcctagtgctgcactcggcaaaggggtcgcctctgcctagtgctgcactcggcaaaggggtcgtctctgcctagtgctgcactaggcaaagcttccgttaccgtgccttccgccgtcatggaaacttttcttcaccgagtgacgtgtggcactaggcaaagtgtttgccgagtgcccgagaaatggcactcggcaaaggcactttgccgattccttcgttaccgactccactttgccgagtgcaacactaggcaa

SEQ ID NO: 5608 - DNA, 128 bp, Zea mays
cgcaaagggagcttctttgccgagtgtcaggactacaacactcggcaaagaggctttaccagttctcaggtgtgtcttttttgccgagtgttgtggtcactgcacttagcaaagacactcttttgccg

SEQ ID NO: 5609 - DNA, 82 bp, Zea mays
aaagtggccttaggcgagtcgtgactgcgtctgctacccgagcttggcctcggatgggtcatgactgcgtctgctgcccggg

SEQ ID NO: 5610 - DNA, 163 bp, Zea mays
atggcggcggctgggagggtcggttggggagagagagagggggaggaaacctaatttggctctggtaccatattggaatagtaaaccctaaccctaacaggggttgggtgatgtattaatagaccgagtaaactgggccagacccattacagaggggtgagat

SEQ ID NO: 5611 - DNA, 117 bp, Zea mays
gctggcggccacagtttctatagtgtttggatgagtcacgtgggggcgaggtaaacactaaagtcattttttgtggcggcgtgatcccaaacaatgtagtggacggtgtagccatcc

SEQ ID NO: 5612 - DNA, 103 bp, Zea mays
tgttaaagacgagggtactcacgtttttaatttaaattcgtgggccctagataaaaccatcgaacttaacgagttaggaacgtgggtacccacatttttaagt

SEQ ID NO: 5613 - DNA, 182 bp, Zea mays
tgattaaggatgtttggtttctatggactaatgtttagttcctatattttattttagtatctaaatagttaaatatggaaactaaaattatttagtttccgtatttaacaatttaaggactaaaatagaataaaataaaggagttaaagattagtccctagaaaccaaatactccttaaatc

SEQ ID NO: 5614 - DNA, 137 bp, Zea mays
cttagggtttgtttggtttgtggctaattacgctacattttacataaggttattcgttcgaattgaaaaactaatcttagctaaaaaaagttagataaagtgtggtaagttagacagcgaaccaaatagtgcttgag

SEQ ID NO: 5615 - DNA, 113 bp, Zea mays
aggtgagtgcccgtgcgttgcgatggaaccatataataacacgataacttatgtacatatgtgtgttatattgttataggtatgtgcccgtgcgttgcgacggaagtaaaaaa

SEQ ID NO: 5616 - DNA, 148 bp, Zea mays
atattccttcaggccttgttcgtttgtaccggattggtgggtcgaaacgattactaaccggattgcttctttaatttatataaactttgattaggtagaacgattccggatgcaatccaacacaaaagaacaaggtctcagtgttgtt

SEQ ID NO: 5617 - DNA, 141 bp, Zea mays
tttattagtttagggctagtttgggagcacatatatatctaagagatttttattttcccaaaaaaattagtttattttctcttgagaaaatataaatccattagaaaaatggagtttctaaactagctctaaaatggttta

SEQ ID NO: 5618 - DNA, 162 bp, Zea mays
attttttaatccttttctcggcgtcatagtctatggcgccgaggtaacacagctcggcgccatacgtgttgcgtagcacgtatctcggcgtcatagtctatgatgccgagtcgtgttacgtcagcgtcatatactatgacgctgagcaaatgatctaaaaat

SEQ ID NO: 5619 - DNA, 72 bp, Zea mays
taggtcatagcactcggcaaagaaggcacacctgtgcaccggtaaagcctctttgtcgagtgccaagaccac

SEQ ID NO: 5620 - DNA, 137 bp, Zea mays
attcctcccttagggctagtttgggagccataaaaccagaggggattggaggggttaaaatctccttcttattcaattttagcccctctaatcttctccggatttcggactcccaaactagcccttaggggatcgga

SEQ ID NO: 5621 - DNA, 147 bp, Zea mays
gaggttcggaacgatttctaaccggattgcttctctaatttatataaactttgattagtcggaacgattccgacgcaaatgaacaaggcctaattaaagttcatataaattagagaagcaatccggttaggaatcgtttccacccac

SEQ ID NO: 5622 - DNA, 77 bp, Zea mays
gcgatctctggcctctgctaagccgtcagacataacacagctttatgtccgacggcttagcgggggccgttggacat

SEQ ID NO: 5623 - DNA, 95 bp, Zea mays
gtctgacacaactagcaggctgacgggctatgcttgggccgctaccgtggcacgcgggcctatttagcacgacacgtttcgctaggcaggcctac

SEQ ID NO: 5624 - DNA, 69 bp, Zea mays
ggaaacacacgagacactggatatagggttgggcctctggcctctttctgatctctgtcatatgaagga

SEQ ID NO: 5625 - DNA, 128 bp, Zea mays
gtcggtttcggagcctttgccgagtgcattttagactagcgctcagcaaagaaggctccagtggatccctttgctagtccctttgccgagtgctccgaaaggcactcggcaaaggctccctctttgcc

SEQ ID NO: 5626 - DNA, 151 bp, Zea mays
acatagccttaggccttgttcgtttacgtcggattgcactcgaaattgttccagctaatcaaagtttatataaattagagaagcaatccggctaggaatcattccgacccatcaatccgacacaaacgaacaagaccttagccggcctaga

SEQ ID NO: 5627 - DNA, 135 bp, Zea mays
tttagggcatgtttggtttgtggctaactgtgccacactttgtctaaagttagtcgtttgaattgaataactaaccttagtcagaaaagttatgcaaagtggggcaagttaggcatcaatcaaacagacccggtg

SEQ ID NO: 5628 - DNA, 72 bp, Zea mays
aaggccataacactcgacaaagaaggcacacctgggcaccggtaaagcctctttgccgagtgatgtggcctc

SEQ ID NO: 5629 - DNA, 130 bp, Zea mays
gggctagtttgagagccacaaaaccggaggggattagaggggctaaaatcccctccttattcaattttgaaaaagaagatgattttagcctctccaatcccctccggtttttggactcccaaaccagctc

SEQ ID NO: 5630 - DNA, 117 bp, Zea mays
ggtaagtcttgctgagtaattgcgtactcagggttttattccctgttgtttttcaggttatatttttgttctgttgtggatggtgctaagtgccggtgggctcagccttcttatata

SEQ ID NO: 5631 - DNA, 149 bp, Zea mays
tggtatcattaggccttgttcgtttgcgtcggattgcagccggaatcgtttcagctaatcaaagtttatataaattagagaagcaatccggttaaaaatcgttcagacccaccaatctcatacaaccgaacgacaccttaatcgatgcg

SEQ ID NO: 5632 - DNA, 252 bp, Zea mays
gaggatgtaatgtctaggctttgtttggtggagctgtagcttttccaaaagcacctcctgaagaagctttcgggaaaagcttgggaagctgctccttgaaagcttctctgcttttcgtacaacaaagtgctgcttttatcagcttgaagaagctgctgccctgtttgggggagcctctagctttttgagctttctgtagaagcgaaagctgccagaagctccccaaatagggccttagatcattacgatttt

SEQ ID NO: 5633 - DNA, 149 bp, Zea mays
caaacctcctaaggccttgttcgtttgtgtcggattgcacctgaaatcattccagctaatcaaagtttatatagattagagaagcaatccgattaggaatcgttccgactcactaatccgatacaaacgaacaagatctaaagatattt

SEQ ID NO: 5634 - DNA, 149 bp, Zea mays
aaatatctttagatcttgttcgtttgtatcggattagtgagtcggaacgattcctaatcggattgcttctctaatctatataaactttgattagctggaatgatttcaggtgcaatccgacacaaacgaacaaggccttaggaggtttg

SEQ ID NO: 5635 - DNA, 156 bp, Zea mays
aacttaacattaagaacgtgggtacagtcgaacttaacattaagaacgtgggtaccgtcgaacttaacattaagaacgtgcgtttttaagttcgacgggggccatcgatttttttcccataagttcgtgggtacccacgttcttacggttaagttc

SEQ ID NO: 5636 - DNA, 82 bp, Zea mays
atccctgtgcaaccgaacaaggcctaaggtggaaataacagtttgctctgtcacacctaaggcactgtttggcacatgtctg

SEQ ID NO: 5637 - DNA, 145 bp, Zea mays
tcgctggactgcgtgctggagcaacggcgatcgatcgatctagcgtggggagaggcggataggcgggcgcgcgagggaggagaataagtttgtgccggtggcccggtctcgtcggtcgcttttgttccagcatgcagctgcgtcg

SEQ ID NO: 5638 - DNA, 216 bp, Zea mays
tatacctgtacatgtgggccggcctggcccgacacgacacatgaccacaaaagcacggcccacaaaggcacatatctaattaaggatcatgtcgtgccagcacgtgtgtctagtcatcggcccacgacacggcccacaattagttatgtgtgccaggccgacccaaataacccaaaatgccttaatgtgccagaccggcccatatgtatacaacaa

SEQ ID NO: 5639 - DNA, 139 bp, Zea mays
atactcctttagagctgatttggtgattgggatcctttgagaaaaaatcctcttgctattcaaaattaaattgaaaggagatttctccccatggatcccctcgggatccctaataaccaaattagcccttatagagctg

SEQ ID NO: 5640 - DNA, 170 bp, Zea mays
  unsure (33)..(34)..(35)..(36)..(37)..(38)..(39)..(40)..(41)..(42): n = A, C, G or T
ctgctgaactcgtccttccttgttcctgacctnnnnnnnnnncctgacttcatcgtcgccagagtcctcactggatttgtgtcctcgtcagctagctccaagcccgatctcgtcgtcgttctgtacgtcatcaagaaatcccaagaatcaggtgaagacgaagctagccg

SEQ ID NO: 5641 - DNA, 140 bp, Zea mays
agacgctaaaggcctgtttggtttgatgtctaacttgtcacactttgtctaacttttcggttagttctttaattcgaacgagtaatcttaggcaaagtgtgatacatttagccacgaaccaaacaacccgtggcatctgt

SEQ ID NO: 5642 - DNA, 119 bp, Zea mays
cactgtcccactgcgtctggttcggtttgccccataagagaagagcctgttgcttgccacggaaaaaaatttgttgcagccgggctgcaaaccaggccgtttgcagcccctcacaaaaa

SEQ ID NO: 5643 - DNA, 97 bp, Zea mays
ctgtctaacttgtcacactttatctaacttttctatctaagattagttcttcaatttgaacgattaaccttaggcaaagtgtgacacagttaaccac

SEQ ID NO: 5644 - DNA, 195 bp, Zea mays
actaggtatatgcccgtgcgttgctacggaatcaatacgataaaatccttcacccaatgcacatgagacaatattgagatgtaccaaaaattgtaatgttaataccttaaaaccactaattcagatgccctttaagctgcaagtgattgggtgaagggcatatgcccgtgcgttgcaacggggacacttatacac

SEQ ID NO: 5645 - DNA, 204 bp, Zea mays
ccttgagtattttctcacggtccatctgtgaggtaatgacctagttagattagaaagatttttaaatcactactttttaaagcatcagtttcgtgtgtcgtgcgtggtgcatcacatgcgaagcgcatatgtatgtttctctctggcttctcacctaccaataagtcattacacaacaaatgggtcgtgagaaatcatccaagc

SEQ ID NO: 5646 - DNA, 140 bp, Zea mays
gcgcattgacctgtttggatcgctgtctaatctgccacattttgcctaacttttctgtctaaggttagttcttcaattcgaacgactaatcttagacaaagtgtggcatagttagccacgaaccaaataggcccttaatt

SEQ ID NO: 5647 - DNA, 136 bp, Zea mays
ttatgggcatgtttggtttgtggctaactatgccacactttgcctaaggttagtcgttcgaattgaataactaatcttaggcagaaaagttaggcaaagtggggcaagttaggcatcaatccaaacatgccctata

SEQ ID NO: 5648 - DNA, 89 bp, Zea mays
aagcagaggacgaccgttgatgtgacgcgatggcggaggattgacagcggcggccggctcgacgacactgtcaacggcggcgccgatta

SEQ ID NO: 5649 - DNA, 126 bp, Zea mays
  unsure (41)..(42)..(43)..(44)..(45)..(46)..(47)..(48)..(49)..(50): n = A, C, G or T
  unsure (63)..(64)..(65)..(66)..(67)..(68)..(69)..(70)..(71)..(72): n = A, C, G or T
gaaatcactaagggcttgttcggttgcgagaggattggagnnnnnnnnnnacctgagaacctnnnnnnnnnntccccttcaatccccctcgaaccacttgtaaccgaacatggcctaaggtagtgt

SEQ ID NO: 5650 - DNA, 149 bp, Zea mays
gagatcaattagaccttgttcgtttgtgccggattggtgggtcggaacgattcctaaccagattgcttctctaatttatataaacttgaattagctggaacgatttcgggtgtaatccgacacaaacgaacaaggtcttagctggacgg

SEQ ID NO: 5651 - DNA, 149 bp, Zea mays
tagaaatgctaaggccttgttcgtttgtgctggattgttgggtcggaacgatttctagccggattgcttctctaatttacataagctttgattagctggaacgattccgggtgcaatccaatgtaaacgaacaagccctaagaccatat

SEQ ID NO: 5652 - DNA, 194 bp, Zea mays
actagctgaatgctcgtgcgttgcaacggaaatatataatatcagtatactacgataacttatatacaacaatgtgttataccgttatgagaaaatgtttcattatcaatttgtgattctggccatacataaattttgttatttataatctatctgtttcaccactacattgcaaccatcagtatcatgcagac

SEQ ID NO: 5653 - DNA, 222 bp, Zea mays
  unsure (43)..(44)..(45)..(46)..(47)..(48)..(49)..(50)..(51)..(52): n = A, C, G or T
ccactaagggggtgtttggtttctagggactaatgtttagtcnnnnnnnnnnctacggactgatgtttattcccttcattttattacattttagttccaaaattactaaatatagaaactaaaactttattttagtttctatatttagcaatttatagactaaaaaggaataaaatgaagggactaaacattagtccctagaaaccaaacccccactaaact

SEQ ID NO: 5654 - DNA, 150 bp, Zea mays
taaaacttttagagctgatttggtgatcagaaaaatggaagagatttatagggagaaatctcattgctattcaattttaaatagcaaggggattcatcctccatgaatccctccatttacctggtcaccaaactagctcttataacagac

SEQ ID NO: 5655 - DNA, 155 bp, Zea mays
gtcagtctcttagggctagtttgggagcctcaaacccgaaggggattggaagggctaaaatcccctccttattcagttttgaataagaagaggattttagccccttaaattccctccgggttttagacttccaaattagcacctagctgtgtgga

SEQ ID NO: 5656 - DNA, 74 bp, Zea mays
gaaatacattagggtaggatacaggatgacatactatccatctatatctgtccgttttcaccctagaatttatt

SEQ ID NO: 5657 - DNA, 145 bp, Zea mays
ttcggcaaagagctttttgccgagtgttgtatttatgacactcagcaaagagccctttgccgagtgtcaaaaaaagacactcgacaaagaaactttttgccgagtgtcaaaaataaaacactcggcaaagagcttcttcgctgag

SEQ ID NO: 5658 - DNA, 164 bp, Zea mays
gcgtgcaatcaaactatccagagcatccaatctagatccaacggtttcatatggaaggggttaaaagtaaaataggtactatgttttaagtggaaggggttaaatataaaataacagtcatcattagatctagatcggatgcaccagatcgtttgattgcatgc

SEQ ID NO: 5659 - DNA, 87 bp, Zea mays
tatgtttgtgcaaccatatcggtcggctttgtggtgtgcatgtgtggagcacattaacaatggtcgatgattgaggtaaaggtcatg

SEQ ID NO: 5660 - DNA, 72 bp, Zea mays
atcctcggtggacgacaaccagcgagccctagcttcgtgccggagaggccgcttgtcatcgcctccatcctg

SEQ ID NO: 5661 - DNA, 189 bp, Zea mays
aacttagtgggtgtttgttttcttgggactaattattagttcctctattttatttcattttagtctctaaatcaacaaatgtggaaactaaaaatcatttcatttctatattagataatctagagactaaaatagaataaaattgagagattaaaaattagtccctagaaaccaagcacccactaagtt

SEQ ID NO: 5662 - DNA, 144 bp, Zea mays
agacgtacaccgaccgaccgaccgacctgctgggtcgacgaacgaccgccgccatctctggactcgaccctacctatcgtggattcgtggggggtcgacgaagactgaatagctagcgtgtggtcggccggacggaaccggaca

SEQ ID NO: 5663 - DNA, 184 bp, Zea mays
agaccacggcggcggtttcagccttcggataccgcatgggaggttttacttgcccaaggacaggttcggccctgattcgtgtaggtttcgacagtgacaaggggcctcatcagtggtcgtcaggtcaggggcagtgagccagcacaacactccaaccgaccggtttgaccgccgggatcgcttt

SEQ ID NO: 5664 - DNA, 161 bp, Zea mays
agaaggatgtcaacttgaccatgggagccagcgagttattcaatctttacgacgacgctgccaagagttgcctcccacgagtgaggccaagttttcctgtggtgagcttggttgatccagatgtcatttgcttcctcctcgaggacaagttccgcgatcct

SEQ ID NO: 5665 - DNA, 101 bp, Zea mays
ttgttcgctacggcttgctgcggctgcaatccggctgcggctgcggcttctacagtatttttctctctatggattgcagctgcagcagtccaacagctgca

SEQ ID NO: 5666 - DNA, 117 bp, Zea mays
ccaaacaaaaaacagagccgctccgttccagttcactctgcaaccaaacaaaaaacagagccgctccgatccagcttaccaaacacagaacagagcggctccgttcttagaatcagg

SEQ ID NO: 5667 - DNA, 148 bp, Zea mays
aatctcatttaggctttgttcgtttgtgtcggattgcacccgaaatcgttacagctaatcaaagttcatataaattagaaaagtaattcggttaggaatcattccgacccatcaatccggcacaaacgaacaaagccttactgaattg

SEQ ID NO: 5668 - DNA, 166 bp, Zea mays
  unsure (104)..(105)..(106)..(107)..(108)..(109)..(110)..(111)..(112)..(113): n = A, C, G or T
ggactacggtgcagccaaggatgacttgccgaccgatcaacgagcgacgcctctgatgtctgatctcgacatcatcgtcgtcagaccatcatcatctagctgtnnnnnnnnnntcgtcagatcgtcgccgatcatcggcaagttgttcttggctacaccgtggctc

SEQ ID NO: 5669 - DNA, 201 bp, Zea mays
tagggtgcgtgtctggtagcgagaatagggagaagggtaatagatgtagagacgacgtgagtatcattagtttaatcctcgatgttacctgataatagagtagtcatgtctattttagagtgtgagttgtcctatagttttttataacggagaatctctctcctaatcctccaattcgtcgaagccggacttgcaaatttc

SEQ ID NO: 5670 - DNA, 118 bp, Zea mays
agcgtagagaaccgtttggtcatctatatttagagtacaagaggctttaggctgtctctaacaacaaactctatacactcctgtacgctaaatttagcgatccaagcgtccgctacat

SEQ ID NO: 5671 - DNA, 104 bp, Zea mays
aagtaagggcttgttcggttagctctcaactcaaacttcttcacaattttttccaatcccatccaatccatgtgtattgggaataaccgaacaagccctaagta

SEQ ID NO: 5672 - DNA, 93 bp, Zea mays
ccgcccggcccaagcccgaaaaggcccatattgtttgaatttcgggccggtccggtccgtttgaattttgggtcgtgtcgggccggcccatgg

SEQ ID NO: 5673 - DNA, 227 bp, Zea mays
atatcaaataggcctattagctcagttggttagagcgtcgtgctaataacgcgaaggtcgcaggttcgagacctgcatgggccaagatttttaattaacaattttttaagtcttttttttttcgcaactttgtctaactgtacctgggccgatcgcatggagtatgatcacgctttacttcggcctagggttctgtaacagctgtggcccataggccatagatcacc

SEQ ID NO: 5674 - DNA, 212 bp, Zea mays
gttacaccccgctaaaatttagcctctgtcctatcgaatgtttaaacctccgttccgagtattaaatgtagtcggattataaaactaatttatcagccgaagattaaaagacgagacgaatctagttcagttggttgggtctatatttcatactcctatttaaaagtcaaacgcttgatgtgacccggactaaactttagcagtagcaacca

SEQ ID NO: 5675 - DNA, 82 bp, Zea mays
gtgtcagggccatagcactcggcagagacgcaatacctgggctcttgtatagcttctttgccgagtgttgtggtcctggcac

SEQ ID NO: 5676 - DNA, 255 bp, Zea mays
ctcaatggtgtccgtgttgtggaggctcttcgtcactccgcttggctcgatggtgtccgggcctttgtcgctttaggcgtctgctcgctcccggagttcgacgttgtggatctttgctcgtggtgaagaatcggagctgcctcgtgtgggtgtgttgaggcttggcaacgatggcgcgccgcggtcttattccttgcgtcggtgtctgaatgtaagcgtcgtcgagttgctttggcagtgtgcggctcgtcttgg

SEQ ID NO: 5677 - DNA, 239 bp, Zea mays
actcgaaacagcttctttgccgagtgtctaaaatactcggcgaagcctagaaaactctcgataaagaaaactcgacgaactgtatatcggcaacggcttctttgccgagtactttttatcggacactcgataaatactttgtcggcaaacaaaagtcgccattacggcgaccggtaacggcgacagagcctttgtcgagtgtccactgtactgacactcggcaaagagtatcgctttgc

SEQ ID NO: 5678 - DNA, 169 bp, Zea mays
agtgtccactgtactgacactcggcaaagagtatcgctttgccgagcgtattaggtgacactcgacaaagagatcaccaacggacccctttgtcagcacctttgccgagtgcaccgagagtcactcgacaaaggttgcttctttgccgagtgccaaggccgcaatgctc

SEQ ID NO: 5679 - DNA, 97 bp, Zea mays
agccggttatggagaaacttgttgagcgtcggatgaagatgtgcgtgaagtttgtatagtacctgccaagcgctcgacaaattgtctggatcggaaa

SEQ ID NO: 5680 - DNA, 140 bp, Zea mays
gactattggcatgtttggtttgttgcctaacttgccacactttacctaacatttctgcctaaggttagttcttcaattcggacggctaaccttagtcaaagtgtggcatagttagccacgaaccaaacgtgccctatgtc

SEQ ID NO: 5681 - DNA, 168 bp, Zea mays
cgagcgtcgccgttcgtcgagtgtttgacacttggcaaagattctttggcgagtgtctgactaagccgagtgtgctactctaagtaaagatggtcgttaactcattaccgcgagcgtgatgttgccgagtacccgacaaaaagcactcgacaaagcgccgaacgctcg

SEQ ID NO: 5682 - DNA, 80 bp, Zea mays
attttattttatcttagtctctaaattgctaaatatttagtttctatatttgtcaatttaaaaactaaaaaagaacaaag

SEQ ID NO: 5683 - DNA, 184 bp, Zea mays
gccggccgaccgtgcgagcaagccgtaggatacggctgggcgttgaacgccgccgccacacagccttggcggctactccttgggcagccaccctcttaccctgcttctactcaccgcaaggcatgattataccttgcctttgatcccagccgtccatccaacgcgagctcgcccagggccagct

SEQ ID NO: 5684 - DNA, 219 bp, Zea mays
actcgataaagagtgctttgtcgagtgtccaactctcatcacaccaagtcactcggcaaagcgccgttagcactcgacagtcattaactatgtcgagtgccctaggaaggcgctcgacaaagacattgcctttgccgagagtcacctctagacactcaataaagaagggttttgtcgagtgtattttccagacactcggcaaagtttattttatttttt

SEQ ID NO: 5685 - DNA, 81 bp, Zea mays
atatatacacactaccggaactgagttttttgccgagtggacactcgataaagagccggattccggtagtgacatgccatg

SEQ ID NO: 5686 - DNA, 78 bp, Zea mays
agagctcgagcgcagcctggctcgcgtggaacgcaccttttggtcgtatcccacgggcctggctgaggccaatatttt

SEQ ID NO: 5687 - DNA, 85 bp, Zea mays
gaaagggaagacatgattaaggtcttgcggaatttgagtttgtttcttttgtctagctgcatgactgtggttatggatgctcgca

SEQ ID NO: 5688 - DNA, 76 bp, Zea mays
tagtcgtgtttttgctcagctatgcccttccagtgctatagaacagaagggcacagctgagcaaaaaacacgacta

SEQ ID NO: 5689 - DNA, 75 bp, Zea mays
caaccgacgggaataagggctaaaccgacgggaattacttattcccgtcggtttagtgcttattcccgtcggttc

SEQ ID NO: 5690 - DNA, 83 bp, Zea mays
ccaggaaccgacgggaataagcactaaaccgacgggaataagtaattcccgtcggtttagcccttattcccgtcggttgtcag

SEQ ID NO: 5691 - DNA, 118 bp, Zea mays
  unsure (1)..(2)..(3)..(4)..(5)..(6)..(7)..(8): n = A, C, G or T
nnnnnnnnaggtaatctacgttacttagcgctatgtttgtttcctttgtgtgtgtgtttgcgtgtaggttcattctctacgggtatcaccgtttgcgctaagcacgtttgattccatc

SEQ ID NO: 5692 - DNA, 71 bp, Zea mays
tgtgtgggctgcatctcggtcttttctcgtcgctccagcttgggaatcagacctgatctgcgaggccccgc

SEQ ID NO: 5693 - DNA, 251 bp, Zea mays
tgttgaatataactttggtgacaggaacaaacaatatcaccttaacgtggagggcaattatagcttcacatcgctcgatagtgccaaaccaccacatcctattggtcgtgatagggctagagcgcaatgaagggagaatgattagcttgcatgctttgaggaccattttctggtacagctgagaatgactggtgagcagaaaacaggctggccaggtgaggatcatgtcatgtcacctaagatctactcct

SEQ ID NO: 5694 - DNA, 192 bp, Zea mays
caatactattgccgcctaggtctccgacgtggtggtgggggtgtcgtggcgcccacgtgacgggggtaggcgttatagatcttggcgccagcagtggatagcggatgactacgtcgacattgattcttccgacgacgaaggcacggcgtacgaccagtccactagactcggaacccgggtggaggcggcacc

SEQ ID NO: 5695 - DNA, 136 bp, Zea mays
tgtaggagagcgccgcggcgccgcctcggcgggtcatggcggaccccttgaacagcacggcgtcgtcgccgcctccccctccgtcgttgcccttcccgtcgtccgccgagaccggcagcagcgtgcccctctcccc

SEQ ID NO: 5696 - DNA, 170 bp, Zea mays
gtgagttttgttaagaacgtgggtaccgacattcttacatcagttaagttcatgggtttttttaagaacgtgggtactcatgttcttaaattaagttcgtgggccctagccaaaaccgtcgaacttagcctattagaaacgtgggtacccacgttcttaaattaagttcg

SEQ ID NO: 5697 - DNA, 178 bp, Zea mays
cctactcatgtcgacctctgctgagcgcgctgccaggctcaaggccaagggaaccagcgaaggagagctgggcgacttccccagccgggctgcacgcctgaaggctgcagaggaagcagcggcgctggcagtccaggcagcgaagcaggcagcggctgcagcagaggcagcggcaagg

SEQ ID NO: 5698 - DNA, 118 bp, Zea mays
aaccaaacaaaggatgaagccgctctgttccagttcactctgcaaccaaacaaaaaacagagtcactccgttccagcttaccaaacacagaacagagcggctccgttcctagaatcag

SEQ ID NO: 5699 - DNA, 74 bp, Zea mays
aggactatctcagtgttgtccccagttgtccttcaaaattggagggacgagaggggacgcaatgggacgtccct

SEQ ID NO: 5700 - DNA, 186 bp, Zea mays
aagtaaggtgctccatgcgcaaaatgcatccaaccgatccgttctgtatccacgatgttatcacatttttgcaaataagtcctcacacgctccccgcgttatggttgttcattaaaaaaacctagtacaccgttggatattggacggatgagttggatgcattttgcgcatggaagcaccgacgtc

SEQ ID NO: 5701 - DNA, 188 bp, Zea mays
ggacgtcggtgcttccatgcgcaaaatgcatccaactcatccgtccaatatccaacggtgtactaggtttttttaatgaacaaccataacgcggggagcgtgtgaggacttatttgcaaaaatgtgataacatcgtggatacagaacggatcggttggatgcattttgcgcatggagcaccttacttc

SEQ ID NO: 5702 - DNA, 236 bp, Zea mays
tgttttgcttagagcatctccaacaatgcctcaaactagtgtcttaaattgaactatgaggctctacacaggaaaaaaaactccaacagtgactcaattcataaaatttggtcaaaaaattatagggcaccgtctcaagtgcctcaaatatactacagtgtagtggctaacctataatctagatttgaggctttattgtcggagcgaggtgttttgttggtgccctaaattctaca

SEQ ID NO: 5703 - DNA, 189 bp, Zea mays
  unsure (179)..(180)..(181)..(182)..(183)..(184)..(185)..(186)..(187)..(188): n = A, C, G or T
tttagggggtgtttggtttctagggactaatctttagtccctacattttattctattttagtacttaaaatgctaaatatggaaactaagactctattttagtttccgtatttgacaatataagaactaaaatggaataaaatgaagggactaaagattagtccctagaaaccaaacannnnnnnnnna

SEQ ID NO: 5704 - DNA, 149 bp, Zea mays
tggatcgttaaggccttgttcgtttacgtcggattgcatccggaatcgttccagttaatcaaagtttatataaattagagaaacaatccggctaggaatcgttctaccccatcaatccgacacaaacgaacaagggctaaagaattcca

SEQ ID NO: 5705 - DNA, 90 bp, Zea mays
tccgactcgtctagcaggcgtgttctacagctataatacatagataaaatattgctgtcgtgtacgactcgtctggcaagcgtgttctac

SEQ ID NO: 5706 - DNA, 99 bp, Zea mays
tactaagatattggcacggctcaatcagaaacagcagcggcatagcacatgatctcgcgcgcgtacgtcgtctgagtgagccgagccaacatcatagct

SEQ ID NO: 5707 - DNA, 190 bp, Zea mays
actaagggggtgtttggtttctagtgactaatgttaagtccttttattttatttctttttaatgtataaattgctaaatatagaaactaaaataaggttttagtttctatatttgataattttggaactaaaatgaaataaaatatagggactaaacattagtccctagaaaccaaacagcccctaaagt

SEQ ID NO: 5708 - DNA, 126 bp, Zea mays
tgtgagaggttgaagctgccagcatgatctggctgctcagacgccggcgggcgtctcgagtgctcgctcgatcgtcggtgacgcttggattcaccagatcatgttgcagcttcactctctcgcagc

SEQ ID NO: 5709 - DNA, 212 bp, Zea mays
gttaacccaaactaaaatttagcctctgtcatatcgaatgtttgaacctccgttccgggtattaaatatagtcggattataaaactaatttctcagccgaagattaaaagacgagacgaatttagtccagttggttgagtttatatttcatactcctatttgaaagtcaaatgcttgatgtgacccggactaaactttagtccctacaacca

SEQ ID NO: 5710 - DNA, 105 bp, Zea mays
tgtcgggcttgggccgacactatagggccgagctggtggtccaggcacgacactgtgtacgaatggaccgggtcgtgctttttagtgtcgtgcccgggccacccc

SEQ ID NO: 5711 - DNA, 77 bp, Zea mays
ttagttggttggtgcatgcgcgaaagggcctctagcctagcggttaaggacttccgagtagcacctccatatcctgg

SEQ ID NO: 5712 - DNA, 157 bp, Zea mays
atgaaaaatcagtaaggccttgttcgtttccgtcggattgcacccggaatcgttccagctaatcaaagtttatataaattagagaagcaatccggataggaatcgttccggcctaccaatccgatagaaacgaacaaggcctaagctgtcatcacat

SEQ ID NO: 5713 - DNA, 148 bp, Zea mays
atgacagcttaggccttgttcgtttctatcggattggtaggccggaacgattcctatccggattgcttctctaatttatataaactttgattagctggaacgattccgggtgcaatccgacggaaacgaacaaggccttactgatttt

SEQ ID NO: 5714 - DNA, 86 bp, Zea mays
  unsure (29)..(30)..(31)..(32)..(33)..(34)..(35)..(36)..(37)..(38): n = A, C, G or T
tgtcttcctaagggcttgttcggttgcannnnnnnnnntcaatccccctcgaaccacttgtaaccgaacatggcctaatgggggtg

SEQ ID NO: 5715 - DNA, 79 bp, Zea mays
gctgtcccacgcttgcttggcccgtccattgtttcgcctcgtgtcattagactgtgtccaacaagcaccgctaaagcat

SEQ ID NO: 5716 - DNA, 75 bp, Zea mays
ttggtctcgagtgagttgtgactgcgtgtcccgttcgatggtgggctcgagcgagtcgtgaccgcatatcccgta

SEQ ID NO: 5717 - DNA, 136 bp, Zea mays
gagatagggttcgggtgtgtggcctggttgggggggcgtgtggccgctggcaccatatgccatatgaaaaatgggccgccgctgtgtcggcccattgctcgtgtcggatcggaccaaaacacgcgggcctctgtag

SEQ ID NO: 5718 - DNA, 118 bp, Zea mays
gaacttaatttaagaacgtgggtacccatgttcctaacaggttaagttcgacggttttggctagggcccacgaacttaatttaagaacgtgggtacccacgttctttaaaaaacccat

SEQ ID NO: 5719 - DNA, 217 bp, Zea mays
ttctgcacgtgtggctggtcaagtcaccgttccagcgtggaaggggaatgccgaaagacctccctgcccctgccttatccattcaggtacgcgtgggctcaacaccattcttctccaccagaatgttgtggccacacatgcctaaatggatacaacagggacagagaggtattttggcattcccctgagggtgacttggccagccatgcatgcaaaa

SEQ ID NO: 5720 - DNA, 136 bp, Zea mays
ggttagtttggtggcaagagaattgaagaaaatttatgagtgggaaatcccttactgttcaaaatccatggaattgaataataaaggattttctcctccatggatcacctccaaatccattgtcaccaaaccggcc

SEQ ID NO: 5721 - DNA, 175 bp, Zea mays
gttttttaagttggtgtcctcagtttttgtggtgtgttcacttatactcttagtcgtgttttttgctcagctgtgctcttctgttctatagcactacaaggcacaactgagaaaaaacacgattaaggatataagtgagcacaccatcaaaactgagggcaccaatttaaaaacc

SEQ ID NO: 5722 - DNA, 199 bp, Zea mays
cggtgtccaatttgttgggcacagctgcacccataaaaaagactcaattatatgataggtgataaaaggcttggcgattcaaaaaaaacgcagttaccgctcccacctcgccaaatcaaatggcatatttgtttaccctagtgctgagaattgggccggccaagtctatcgtgcttcgtgccaaatggattcgaaccag

SEQ ID NO: 5723 - DNA, 96 bp, Zea mays
ctaacgagccacgagcatttcgttcagccctatttccttgctacttcgctctttgggcctttaatagggctggacaaaatgctcgttgttcgtcgg

SEQ ID NO: 5724 - DNA, 71 bp, Zea mays
gatgctcggcgccataggctatggcgccgaggtaacacatctcggtgctacatcctatgacgccgaggtgt

SEQ ID NO: 5725 - DNA, 85 bp, Zea mays
catgtcacacctcggcgtcataggatgtagcaccgagatgtgttacctcggcgccatagcctatggcgccgagcatcgagtccaa

SEQ ID NO: 5726 - DNA, 77 bp, Zea mays
cgagccgttgtgaacggtccaatgtaaagaaactactagttagttgcccgtgcgttgcgacggttcacaacaatact

SEQ ID NO: 5727 - DNA, 148 bp, Zea mays
ttgtcacctttagggctagtttgggagacacaaaaccggaggagattggaggggctaaaatcctctccttatttaattttgaataagagaattttagtccctccaattcccttcgggtttttctcccaaactagcccttactaggtga

SEQ ID NO: 5728 - DNA, 104 bp, Zea mays
tcgacgccatagcctatggcgccgaggtacgtgctgcgctggcacgaacggacgtcgtggcgccgacgtggcaccgagctcggcgccatagattttgacgttga

SEQ ID NO: 5729 - DNA, 110 bp, Zea mays
tgttcgacgccatagcctatggcgccgaggtacgtgctgcgctggcacgaacggacgtcgtggcgccgacgtggcaccgagctcggcgccatagattttgacgttgagct

SEQ ID NO: 5730 - DNA, 125 bp, Zea mays
tataaggaacctgtacaccccctcataatacagagaagagaaagaggccagaggcccaaccctataccttgtgtctcgtgtgtttcttctgtcgtgcttatgggaagggagacaggtcttctaca

SEQ ID NO: 5731 - DNA, 69 bp, Zea mays
aggcggttttgtcttagggtccgcttgtgaaaatgatagagcatcacaggcggtcctaaacaaaaaccg

SEQ ID NO: 5732 - DNA, 230 bp, Zea mays
atagttgtacatgtgggccggcctggcccggcacggcacaagcacatctaggcacggctcacaaaggcacggcacacaaaggcacaaccccaattatgggtcgtgccgtgccagcacatgggccgagccaacggcccacggcacggcacacaattacttatgtgtgctaggctggcccaaaaaacccaaaatgtcgtaatgtgccagaccggcccacatataaaatgcaa

SEQ ID NO: 5733 - DNA, 171 bp, Zea mays
aaaaaatgacgcacgacgaccgttgaaactgatgcttttaagtatagtatagatatggttttcatcacgagaactcaaaattgaaactagtagaaatagtcaaatacaggacgcatttcatcttgctatgtaagcaaccgaagtcgtcaaggtccttgcgcgaagacccgc

SEQ ID NO: 5734 - DNA, 160 bp, Zea mays
ttgtggctgcctcttaaggccttgttcgtttacgtcggattgtacctggaatcgttccagctaatcaaagtttatataaattagagaagtaatccagctagaaatcgtttcgacccaccaatccgacaaaaacgaacaaggcctaaagaggctggtgata

SEQ ID NO: 5735 - DNA, 139 bp, Zea mays
tgactaacttttctgccaaaggttagttcttcaattcgagtgactaagggcttgtttggttcatggctaactgcgccacactttgcctaagattagtcgttcgaattaaagaactaaccttaggcagaaaaattaggta

SEQ ID NO: 5736 - DNA, 152 bp, Zea mays
acaccctctgcgcattggacttgcacgtgtgcagccacctggatcccatggacgccatctggacgaaaggggagcacatggacgggcacctggaataggtcgcaataataaccagcggaggcgccctcgtgacggccggtagcggaatgtgg

SEQ ID NO: 5737 - DNA, 85 bp, Zea mays
cacgtcatacctcggcgccataggttgtgcgtcgagctgtgttacctcggcgccacagcctatggcgccgagtatcgggtccaaa

SEQ ID NO: 5738 - DNA, 186 bp, Zea mays
ggttgtggcacccccccccccccccccaattcgccgcactgttcggtagctcctgatgaacagtgcaccatcacaatcagtttctgttttttttcttcttcttttcaacaacaaggtcatggcgcgagcacttgtgttgtgtttttacagtggggggggtggggggggggggggggtcgggtcact

SEQ ID NO: 5739 - DNA, 214 bp, Zea mays
taggagagtgcccgtgcgttgcaacgggaacgtataaaaccacgataaactatgtggcaaatcgagaagttttacatataacggtgttctcgatttgtatatcagttatgcttcctgtggagcaaggaagcgaatgcaagccagcgttttgtattagtgcattctgttcagttcttacttgatcatcccgtgttctcgcgtgtgccatggccga

SEQ ID NO: 5740 - DNA, 217 bp, Zea mays
ctggggaagggaagtggagtggagcgggcgcgagggagtgtggaccggagaggggaccgacgagagtacgagacccagaggagaggtggttgtgcccgttttccggactccggagggtttgactctctcagctcagctgcaagcctgcaagctgctgaaagctgatggtctctctcgttctgtctcggtgtccgtccagatcatagctagcttgccc

SEQ ID NO: 5741 - DNA, 181 bp, Zea mays
cggatgggaatggcagaaccggaatggtggcagaacaaggaatgggcagactactcttagagccttaataagtagtagagattgtgcacggcgatggtgttcggcaggaaagttgtccataaaccagttaaggtcgtacatccgcggcttgaggccgtagcggttcctgcccctgccgccg

SEQ ID NO: 5742 - DNA, 190 bp, Zea mays
cgataagtgggtgtttgttttctatagactaatttttagtttctacattttattctattttagttcctaaattgcaaaatacgaaaactaaacctctatttcagtttccgtacttgacaatttatagactaaatagagtcaaattgagaaacaaaaaattagtccctagaaaccaatcactctaatctta

SEQ ID NO: 5743 - DNA, 81 bp, Zea mays
taattagagcacggcccagcccgcgattcgtgtcgtgctagcccgattttaaatcagccgtgtcgggccgtgctttgttct

SEQ ID NO: 5744 - DNA, 214 bp, Zea mays
gatgacactaaggccctgtttggcacagcttattttcagcttcttcacaaatttaagcagaagttctgccaaacaggcagcttatcagttcagccgcttctcagaatacactaaaaacagccaacaagcagaagctgattttcaccagcttctcagataagctgttttttcaacaagcagtagctgtgccaaacagggcctaagtcgaggtggt

SEQ ID NO: 5745 - DNA, 76 bp, Zea mays
cgcaggtaacggtgacagagcctttgtcgagtgtcctacccgacattcgacaaaggcttcctctttgttttttgtt

SEQ ID NO: 5746 - DNA, 151 bp, Zea mays
actttcattaaggccttgttcgtttacgtcggattgcacccgaaattgttacagctaatcaaagtttatataaattagagaaggaatccggttaagaatcgttccggcccaccaatccggcacaaacgaacaagacctaaagtgcaaaaaa

SEQ ID NO: 5747 - DNA, 78 bp, Zea mays
ggctaattaacctggagttaattttgcgtgacaggctatggctgaaggcagcaagactgacttcgcggagcttgccct

SEQ ID NO: 5748 - DNA, 139 bp, Zea mays
ttccataatttagggctagtttgggagctacatttcccaagaaatttctattttatcaagggaaaatgaattaattccctttgagaaaatgaaaatcccgtgagaaaacaggattcctaaactagcctttataagaaaa

SEQ ID NO: 5749 - DNA, 76 bp, Zea mays
ctcaaagcaccctgagccaggctcaccagatacgagtaaattggtcgcatcggtagagccaggcttcaacagtcct

SEQ ID NO: 5750 - DNA, 166 bp, Zea mays
ggtggagtccggactaagtattggctcggcgcggtggcgctcactagcggtttgttggggaaatgatccctggtctagcggcggccctatatgattacttaggccaggaatcagtatgcttgttaatatcaccagcggcgagccaatacttagaccagcgtatata

SEQ ID NO: 5751 - DNA, 116 bp, Zea mays
cgcttagggtgcgagaggtcccgagttcaattctcggaatgcccccttttcgttcttttttttttctcctttttgtcctttcgatctgtatttggcgctatctcgcctcccaactc

SEQ ID NO: 5752 - DNA, 124 bp, Zea mays
ggttgtgatattggcacggctcaatcaattaaacactgcgcccgcacctcgatcgaatgcgcagaattaagctataagccacccgcggccggcgagttgattgagccatgccaacatcgcactc

SEQ ID NO: 5753 - DNA, 152 bp, Zea mays
accatctaaatgcatgtgcagctctttagctggtcaaagaccgttacttaaatccacgaactttgaaatgcacttgcgtgccacttacatgtcggcgtaccggtgcgtaccgtcgccagatgatgagctagcgcctgcgattccgttatatt

SEQ ID NO: 5754 - DNA, 136 bp, Zea mays
taaagggcatgtttggtttgtggctaaatgtgccacactttgcctaaggttagtcgtccgaattaaacaactaaccttagacagaaaagttagccaaagtgtggcaacttaggtagtaaaccaaacatgcctaaag

SEQ ID NO: 5755 - DNA, 148 bp, Zea mays
catggtcttagggcctgtttggtttgtagctaactgcgccacattttgtctaaagttaatcgttcgaattaaagaactaaccttagacagaaaagttaagcaaaatgtggcaagttaggtagtgaaccaaacagacccttatactcca

SEQ ID NO: 5756 - DNA, 74 bp, Zea mays
aggactatcccagtgttgtccccagttatccttcaaaattagagggatgagagaggacgccaggggacgtccct

SEQ ID NO: 5757 - DNA, 73 bp, Zea mays
taggatctacatgtgttaaggtggattaggatgtaacttatatcccaatccacctcaacaaatatagattaga

SEQ ID NO: 5758 - DNA, 156 bp, Zea mays
attggggaagattgaggccccgttcggttgatagggattggagacccggattgattcctagccggattacttctctaatttatatagattttgatgagctgaaataaatcctggtctattccggtgaaaccgaacagggccttagtgttgtcgtct

SEQ ID NO: 5759 - DNA, 77 bp, Zea mays
caaagtgttacactcggcaaagaacacttgacaaacattttatcggtaaagagttctttagtgggtgttttttcggg

SEQ ID NO: 5760 - DNA, 223 bp, Zea mays
ttaagggataactaggtattaacaggtagcacaaactatctagatttcagacatcaccatatcggcaagcactcatccatgaaccatgattcattcatccatccatcagaaaataaataagtactttgagaccgatagaagaaatggagaaatggagtttgctcaccttccttggtcaccatctatgttcgttggcgcctgagaatccatagttgtcaccgtc

SEQ ID NO: 5761 - DNA, 214 bp, Zea mays
gctgaagactaagggtgcgtttggttgcgggacagccaggacagggacgtcctcaggcgtcctctcttgtccctccaattttgagggataactggggacaacactgggatagtcctgtcccaacccctaaccctgaaccaaacaaccttatttgagggatcgtcctgtcccatcccgtcctgtcaatgcaaccaaacacaccctaagatgatga

SEQ ID NO: 5762 - DNA, 187 bp, Zea mays
gaccaaggcgagagcaggctcggatgagcgaccacacgcgccagagcttgggcagaacgcacgggcacacgtgttcgaccctggtcggcacgccagagctcgcccaacccgcgcacgcgttcgccccggcgtccggtcaagtccgccgcgcgcccacgccctcggccgtgcccgcccgcgcctataa

SEQ ID NO: 5763 - DNA, 181 bp, Zea mays
gatgaacagtgacacgctagatctggggggagagagaagggagccaacgtgtagggtgcgttgtaggggacaccgctgcggccgtagaatgctccctacatgccgcatgcaaggggagggggctgcgtaggggctgctgttgcagttagtcttagatcaggttagtgtgtccaaggctgat

SEQ ID NO: 5764 - DNA, 157 bp, Zea mays
tcttgagtacatggaccgtggatcgcttgcagacattgttaagcaagtgaagactattctggagccataccttgcagtactttgtaagcaggtcttggagggtttattgtatcttcatcatcaaaggcacgtgattcacagggacataaaaccatct

SEQ ID NO: 5765 - DNA, 79 bp, Zea mays
tgaaccctcggatcgaaaaggccgtccctttgcgccggccggccgaccggaggtttggcgctgttcggcggaggagctg

SEQ ID NO: 5766 - DNA, 213 bp, Zea mays
  unsure (104)..(105)..(106)..(107)..(108)..(109)..(110)..(111)..(112)..(113): n = A, C, G or T
tagaacggagccgttccattcctgattttaggaacggagccgctctgttctgtgtttggtaatctggaacggagcggttctgttttttgtttggttgcagagtnnnnnnnnnngttccggatctgaggagaatattctctaattggagtttttccgttctagttactttgtaaccaaacaacaacaaaactgggacagaacggttccgttcta

SEQ ID NO: 5767 - DNA, 159 bp, Zea mays
ttcaggaatagccctggaatttttcaggttgatcaaaacttacataagggcttgttcgtttgtgccgaattggtgggtcagaacgatttctaaccggattgcttctataatttatataaactttgattagctggaacgattccgggtgcagtccaacac

SEQ ID NO: 5768 - DNA, 210 bp, Zea mays
gcaaagaagattctttgccgagtgccataactcggctctcggcaaaggtaacgatcgtcaactttagacggcgactgacggcctttgccgagagccgctcttatctttgccgagggtattcctgtgccgagagtcctgctctcgacaaacggcytcgttaccgagagcagaactttgccgaatatggcactcagcaaagactttttgcgg

SEQ ID NO: 5769 - DNA, 84 bp, Zea mays
ggccggggcgccggcgccgaagctgccgtctttccctgggcctgtcgcccaggcgggcggcgggttcgcgtcggccttgaagcc

SEQ ID NO: 5770 - DNA, 189 bp, Zea mays
cgataaagaagttctttgccgagtgtcaaaaaatactactgagtgtcaaaaataaaacactcagcaaatagcttcttcgccgagtgtgagtgttttattttaccgaggatttttttcgtttctttaccgagtgctcgaaaaaacacttgacaaatatttggcactcggcaaagaaccaaatttctactt

SEQ ID NO: 5771 - DNA, 104 bp, Zea mays
tatacatacatactccctccgttccgttttagatgtcgccgctatttatagattggctgttggaaacgacttgtaaaaagaaatggagggagtacctattagaa

SEQ ID NO: 5772 - DNA, 83 bp, Zea mays
agaccatttgctcggtgtcatatactgtggcatcgagttaacacagctcgacgccatagcctatgacgccgaggtacgtgaca

SEQ ID NO: 5773 - DNA, 221 bp, Zea mays
aacacgcaaggtatagatagccaagtgggccgtgctcaatgagctaagcacgacccgccccgtagtgcttcgtcacatgcacgattcatatagtgtcgtgccggcgctggcactatatgaatcgtgcccgtgccgtgccgtgccgaagcactatggaccatgtcgtgcttagtgtcgacccatttagcacggcccgtttggccatctatacaacaaagaca

SEQ ID NO: 5774 - DNA, 73 bp, Zea mays
tggctaaaagataaagagacgacgtggacgtacggatgcgcgcgtttgcgtcgcgctctatatagtagcaatt

SEQ ID NO: 5775 - DNA, 152 bp, Zea mays
aaaatcactaaggctctgttcggttgttatggatttgagcctcggattgattcctagccggattacttctctaatttatataaattttgatgagctggaataaatcctggtctattccggtgaaaccgaacagggcctaaaggactcagtac

SEQ ID NO: 5776 - DNA, 91 bp, Zea mays
ggattgatggatcggaacgatttcaagccgaattagttctctaaattatataaactttgattagctggaacgattcctggtgcaatccgac

SEQ ID NO: 5777 - DNA, 149 bp, Zea mays
taggtgagtgcccgtgcgttgcaacggaaacatataatactatgatattttatgtacaaatgtccactacattgcaaccatcagtatcatacagacttctatatataactaatacaatatccgtgtgttgcgacgacacataaattatt

SEQ ID NO: 5778 - DNA, 192 bp, Zea mays
cggaatcacgttcttggccgagtgtttaagacactcgacaaagtctattttacactcggcaaagccttcgccgagtataacactcgacaaatatttcatcggcaaaggttctttgttgagtacttttttttcggacactcggaaagactttatcgagtgtcaaaaagcactcgacaaaaaaacactcggtaa

SEQ ID NO: 5779 - DNA, 146 bp, Zea mays
gggacattaagggcctgtttggtttgtgtctaactatgtcacactttgtctaagattaattattcgaattgaaaaactaaacttagacacaagtgtagtaaaatgtgataaattaggcagcgaaccaaacaggccttaaatccctt

SEQ ID NO: 5780 - DNA, 129 bp, Zea mays
gttcatcaccctaaacactatgctgtgggtccacaagtaattgttagtagataaaaaattgatagttgatatagaaaataatattttatagttgtagtggggtataggggagtatttagggggaaccgt

SEQ ID NO: 5781 - DNA, 87 bp, Zea mays
gccttgcatgcactgtgcgccatcatcaaataactgctacttaactccacagatttgtgtttggtgctggcaccacatcatagacat

SEQ ID NO: 5782 - DNA, 240 bp, Zea mays
tcttcgttgtcccgttcttgctacctgctaacatacgacgtatgcatgcgtgcagagtatagaagtgctccatataaactaccaaaaccctatgcttaacacaaagataatatgttcttctagcatctttcgttattgataaagtttggggcttccatattttgaatttggtttttatcgttgttataaaaatgagcatgtccactgaaatgttggtggtggtgggtatgagtactcgtt

SEQ ID NO: 5783 - DNA, 219 bp, Zea mays
gcgaggacgctggaacgctggaacgtagatcctagcggcggaaggttgggaaggaaagagagctggcggcggcggaaggttagggataacttaagggcagctgaggaaaaatcaggtttagtcccctttagccacctcttaagggattagggactaaattggtttagttccttctttagtcactaggtatgtgcccgtgcgttgccacgaagctaaaaa

SEQ ID NO: 5784 - DNA, 183 bp, Zea mays
ggtcccggcagaataaaatctccgaaccctggcctccatacaataacgggccgacatcaaccgtctactctgcaacggcccaaccggagggcacaccgaggggatttttttaaacaagaccgaaaattcgcccccgagtataatggaacccgggacttggaggtgctactcgaaagccttaac

SEQ ID NO: 5785 - DNA, 132 bp, Zea mays
actacctattaaggctgtaaggggtaggctgtctcccctggttctgacttcagccaatctgcaccgtccatctatatgcatcaaatcatcaccgtccgtctcgtcgcctccgcttcaagcctcttccatccc

SEQ ID NO: 5786 - DNA, 84 bp, Zea mays
gggtgcccgtcacagagtggtggagcgtgcaggctttgggtacggaaccaggctaagcggctacactgctccggaccaccccat

SEQ ID NO: 5787 - DNA, 158 bp, Zea mays
ttcatggtcagtcagtagcgacttacgtggcaggttgggcttcaggtggacgatgagctggacgacgtgatgacgtcgtcgtcgaatgcggtgcccagaacaacccgagagtcgccgacgttggcgacgaccatgaggtccccctgcttgacgatgga

SEQ ID NO: 5788 - DNA, 155 bp, Zea mays
ctcagaacgacttaggccgtgttcggttgttagggattggagcctcggattgattcctagccggattatttctttaatttatatagattttgatgagctgaaataaatcctggtctattccggtgaaaccgaacagggccttaggaagcttcacc

SEQ ID NO: 5789 - DNA, 144 bp, Zea mays
agagtgggatgcagccaaggatgacttgccgggtattttgagcatgcatgttacaggggagcatatgcaatctgtttggaattttgagcccataccgtgcggtgcctgtcttccggcaagttgtccttggctacatcttgttct

SEQ ID NO: 5790 - DNA, 74 bp, Zea mays
gtggtggtgcttgtgcgtccattggtgaccgtccacaatcagtaatagagagaccaatgctgcaatgcacacca

SEQ ID NO: 5791 - DNA, 84 bp, Zea mays
ttacgtacctcggcgccgtagcctatggcgccgcgctgtgttacctcggcgccacagcctatggcgccgagcaaagggtccaaa

SEQ ID NO: 5792 - DNA, 234 bp, Zea mays
attggcgacttcaccagcgacgaggagcaccgccgactcctatgagcctaggacgacgatgacgaccatggattctcaggcgccaacgaactcagatggtgaccaaagaaggtgagcagactccatttctccatttcttctattggtcccgaagtactgatttcttttctaatgggtggatgaatggatcatggttcatggatgagtgcttaccgatgtggtgatgtatgaaat

SEQ ID NO: 5793 - DNA, 134 bp, Zea mays
cttagggtctgtttggtttgtggctaatatgccacactttgtctaagtttatcgttcgaattgaagaactaacgttagacaaaaaagttaggcaaagtatgataagttaggcagcgaaccaaacaggcttacta

SEQ ID NO: 5794 - DNA, 93 bp, Zea mays
tggctaatatgccacactttgtctaagtttatcgttcgaattgaagaactaacgttagacaaaaaagttaggcaaagtatgataagttaggca

SEQ ID NO: 5795 - DNA, 76 bp, Zea mays
tcctttctctctccacacagatttagcgtgtcactgttcatcaccctaaacactgtgctgtgggtccacgagtaat

SEQ ID NO: 5796 - DNA, 151 bp, Zea mays
tatccattccactggcaggtgatgtgccgcctcagcatttaatgagacctatccattccgctggcaggcggcgatctgtctattccgcaggtggcgtgcctgtccattccactggtaggcggcacacccatactgccgcgtgcactatgct

SEQ ID NO: 5797 - DNA, 82 bp, Zea mays
atcacaagcggtttttgtttaggaccgcctgtgatgctctatccttttcacaagcggaccctaagacaaaaccgcatgtgat

SEQ ID NO: 5798 - DNA, 76 bp, Zea mays
ctgcggagctccggctcctggcaaagcggaatgcaaacaatcgtatctgcattgccgaggctggtgccattccctt

SEQ ID NO: 5799 - DNA, 203 bp, Zea mays
gcaatggcgcacaacctcaacgtgttgtggatgaatttgccaagcggcatggttccatggtgaatttagagcggcggctatgtttgggtcttgaagagagttaaaacgcgcgtcgttggttgggaatgttgacaactacgtcaccacggatcaccagatccgctcccttccctcccgtcagcagtagaggcgtgagaagctgt

SEQ ID NO: 5800 - DNA, 184 bp, Zea mays
atggaagcgtgcaagcaaaccatcagatccattagatcgtgatctaaccgcagttcacatttaacatttaaatccttcaccaccagctcaataatctttataaaaaaacctctaacaaactatagttgtatctatgattggatcgtaatttaatggatcagatggtttgctgacacatttgtac

SEQ ID NO: 5801 - DNA, 83 bp, Zea mays
cgtaggcatccacatttctctacggtgcacggttctgtcgtcgccagcgctgaaagtcgcctagaggggggtgaataggacga

SEQ ID NO: 5802 - DNA, 80 bp, Zea mays
gggttagtttgagagccacaaaaccggaagggattagaggggttcaatccccttcggttttgtagctcccaaacttgtct

SEQ ID NO: 5803 - DNA, 168 bp, Zea mays
gatttggagacagggatgagacagagcatgggatggggccatcaacaaagtggagggactagcttgcgaggcagaaagaaggtgccagtgccggtgcctccccggtgaaacgatgatgggagtgttgttgctccctcccctgcactgcctcttccctggctccgatcc

SEQ ID NO: 5804 - DNA, 146 bp, Zea mays
tcttaaataataacttatatctgacggctgtcagataagacgtcggacagaagcttacgtccgacggccggactgatagccgtcggacataaaactatgttcgatggcttatctgacagccgtcggacataagttattttaacgcg

SEQ ID NO: 5805 - DNA, 177 bp, Zea mays
ctttttcgcctgattggatgcctgtatctggacgcgcaggctcgggtggccttggctaatccgatacggcaattttctacgtacatgtggatgcaaccaaatagctaaataacttgttttgcatccgctcatgcagcctgcgtctcccttgtgcaggcaaccaaacaggagcttaga

SEQ ID NO: 5806 - DNA, 146 bp, Zea mays
gatgaatcgaaacatgatgccgcgggaaacagacgaagtggagggaaacgacctgcatttattgccgtatggagggaaaatgcctccttgctctgttttggcaccagaaacctccattctgcaacctgagcatcatctcttcttcc

SEQ ID NO: 5807 - DNA, 88 bp, Zea mays
cccaaaaattgtctgggctttcttggcccgaacccgtttggcacgaaacacgatgggcttgggccgggccggcccggcacggcccaat

SEQ ID NO: 5808 - DNA, 148 bp, Zea mays
acagtcccttaggccttgttcgtttgtgttagatttcactcggaatcgttccaattaatcaaagtttatataaattagagaaataatccgattaggaatcattccgacccatcaatccggcacaaacgaacaaggccttatgtgttaa

SEQ ID NO: 5809 - DNA, 98 bp, Zea mays
gagtgttaaaaaaacactcggcaaagaatctctttgccgagtgtcaaaaataaaatatttggcaaatagcttctttgctgagtgtttttttgcttagc

SEQ ID NO: 5810 - DNA, 186 bp, Zea mays
tcccacgccgacggcggcgccggcggcgtcaacatcgcgttcggcgcgccgccgcccgcgcaccaccacgggtacctgttcgctccgacggcggcggcggcaggccatcagatgggcggcggcgtgcacccgggactacaccaccacgtccagttcagcggcgccggcgccggcatcgacggcgag

SEQ ID NO: 5811 - DNA, 132 bp, Zea mays
ctataaacgtttttctagactcagtgagcatatagagtggacggcggtttaaacacaaaagacgtcttagttgaagttgtacgcaattcaacatgagtcatgttggctagagggtggaaggctaggcattct

SEQ ID NO: 5812 - DNA, 192 bp, Zea mays
tggaaaccaatgcgtttggttgcaatgacatgacgggacaagatggttagatccctcaaataagtttagttcagagggttgggacaggactatcccaagattatccccagttatccctcaattggagggatgagagaacgccagtggacgtctctaacctgactgtcctgcaaccaaacacacctaaaaaat

SEQ ID NO: 5813 - DNA, 121 bp, Zea mays
tacaagtcacggctgcaggagctgtgccagaagcggcgatgggcgccgccgttgtacgagcctacccgagagggtcctgcccacgcgcccctcttccgcgccactgtcgtcgtgaatggcg

SEQ ID NO: 5814 - DNA, 113 bp, Zea mays
tgtaaaatagggcattgttatgattgtttttaatgattaagtctatatttcaagacgtggcagtgatttatgccacaggtaaagagcatctccaacaatgtgccacaaaatag

SEQ ID NO: 5815 - DNA, 191 bp, Zea mays
aattaaggggtgtttggtttttagggactaatgtttagtccctagattttattctattttagttccaaaattaccaagtatagaaactaaaactttattttagtttctatatttagcaatttatacaataaaaaaggaataaaatgaagggactaaatattagtccctagaaaccaaacgaccccttaacc

SEQ ID NO: 5816 - DNA, 101 bp, Zea mays
caaagatgcttctttgccgagtgccgcgcagctgtcactcggcaaaggaagctttaccgagtgtcttatgcagacactcggcaaagtatatttttattttt

SEQ ID NO: 5817 - DNA, 233 bp, Zea mays
gtagagctttatgatgtgtttggttcggtgtcaacgagagatgggatgggatcaactctgagttgactccgtcccttattttttaagggatggccccatccactatttttgaaaaatattccttgaccgtgactctagacctccaaaccaaacatgggtcaacttagaatgatcctatcccatccctcttcatccttcctcgtccatccatccaaacactacaagagtgctga

SEQ ID NO: 5818 - DNA, 145 bp, Zea mays
taggtaggtgcccgtgcgttgcgacggaaccatataataacttatgtacatataggtgagcgtccatgcgttgcaacgagaacatataatatcacggtaacttatgtattatatgtctccgttgtaacgcacgggcactcaccta

SEQ ID NO: 5819 - DNA, 112 bp, Zea mays
agtttactaggtgagtgtccgtgcgttgcaacagagacatatattataatacataagttaccgtgatattatatgtctccgttgtaacgaatgggcactcacctagtaaata

SEQ ID NO: 5820 - DNA, 85 bp, Zea mays
gaaccctttgctcggcgccataggctatggcgccgagttaacacagttcaacggcatagcctatggcgccgagatacgtgttgcg

SEQ ID NO: 5821 - DNA, 78 bp, Zea mays
  unsure (67)..(68)..(69)..(70)..(71)..(72)..(73)..(74)..(75)..(76): n = A, C, G or T
cctttggctcggcgcatagccaatggcgccgaggaacacagctcggcgccataggctatggcgccgnnnnnnnnnnag

SEQ ID NO: 5822 - DNA, 250 bp, Zea mays
  unsure (186)..(187)..(188)..(189)..(190)..(191)..(192)..(193)..(194)..(195): n = A, C, G or T
  unsure (240)..(241)..(242)..(243)..(244)..(245)..(246)..(247)..(248)..(249): n = A, C, G or T
ccgctcctccacctcgtcgcagcccccaaggccccaactacccccagtctcggaagagaactatccagaagcgcaagactccaaagccctcctcttgctatccctcccttcctcgccgcgggatcggcatgaatgtacctaccaaaaccctcacggatccctggcattcgatcgcctcactcttannnnnnnnnnaggtcgccttcccattcttcctcgccgcgggggtcgcctgaggtnnnnnnnnnnt

SEQ ID NO: 5823 - DNA, 74 bp, Zea mays
atgctcacgagttatattggttagtgtccttcagttaggcgggagaacgtgaccagttaaacggcctggcccgg

SEQ ID NO: 5824 - DNA, 175 bp, Zea mays
ttggtttgaagtcaaagtaggatgagtcgggggcgccaccgtcccctcgattttttgggatcacgtcgcccccaaaaatcactccggtgctcaacctcgccctcgcttgactctcaaccaaacactatagaaaacgtggccgcctcatctcatccctctttgtacattcaaccaa

SEQ ID NO: 5825 - DNA, 97 bp, Zea mays
caaaggcatcattgagcgcagcgttgatgagccagccgccgtgcctcccctgtcggctgcggcggctcaccagcgctgcactcaattacgcctttgc

SEQ ID NO: 5826 - DNA, 110 bp, Zea mays
taggcacggcactattaggcactattagtaatcgtgtcgtgccgtgccggcactagtgcctaaccagcggcccaggcactacactatagtgcctaatcgtgccgtgccgg

SEQ ID NO: 5827 - DNA, 81 bp, Zea mays
cggtagaatttggtatccgcgagtacgattatggatacatgtatgagttgagttttgtctcgcgggtatggattcgcgaac

SEQ ID NO: 5828 - DNA, 107 bp, Zea mays
taaggcccgccgtgctttgaccgggtgggaagaaaatgaagtaaaaaaaagacagaaaattcactttgctaggattcgaaccttggttggagcattggaatgcctag

SEQ ID NO: 5829 - DNA, 93 bp, Zea mays
atactgccggaattcagctctttgtcgagtgtccgaaagaaaacgttcggtaaatcatttgtcactcggcaaagagccaaatttcggtagtgc

SEQ ID NO: 5830 - DNA, 83 bp, Zea mays
cggacacgctgatcaggttgcgttggtaatcggctgagttatggcattagctgaatattggctgcgccctggcaacacgacgc

SEQ ID NO: 5831 - DNA, 76 bp, Zea mays
aattcaccttaatccacatggattgagatgaattatggtgtaaattgaactcaatacatgtagattgaggtgatcc

SEQ ID NO: 5832 - DNA, 87 bp, Zea mays
tagttcggtcagagctgcaagcctgcaaaagtacagctttttagtgtctccgttgttttctgcatggcatgtactctataagctgtc

SEQ ID NO: 5833 - DNA, 94 bp, Zea mays
gtataaaaagaaaacactcggcaaagaattttttgcagagtgcaaaaaaaatactcgacaaataagctttttactaagtgttttcttttactga

SEQ ID NO: 5834 - DNA, 108 bp, Zea mays
ggaggggccaaaggcctgtaggacttcgctcttgtccgcccgtttgccctggaacagtcgatccaggccaaggaatggtcttgggcggggcgacgggtaactgctccc

SEQ ID NO: 5835 - DNA, 214 bp, Zea mays
tacagtgttttaggatgtgtttggttgcaataataggacgagacgggatgagacgatccctcaaataaggttgttttattcaagattaaagattaggatatgactatctcagtgttgtctccagttgtccctcaaaattggagggacaagagagaatgatagaggacgtccctgtcttagttgtcccgcaaccaaacacacccttacactatta

SEQ ID NO: 5836 - DNA, 106 bp, Zea mays
gcttcgtgcctaaggcgccacaatttgcctaactttttttgtctaaggttagttctcaattccaacgactaagtttaggcagattgtggcgctttaggtggaaaac

SEQ ID NO: 5837 - DNA, 97 bp, Zea mays
ggagacggtagaactgcgcagatcgacgacgcagcatggggctatccaagcaccaacgggacggcgtgggtcggggctgcgcagatctgcggtggag

SEQ ID NO: 5838 - DNA, 161 bp, Zea mays
taggaagttagctaacttcctagaggctacagtcagccgtaggaaattagtcgtaggaagttagtcagctgacgacgctgacagcgtgaagctactatcttctgagaacctactaacttccgagaggcttctttggctgtaggaagttagctaacttccta

SEQ ID NO: 5839 - DNA, 150 bp, Zea mays
tgatcgcctgggtgacctggcgcgcacggtagaacgcctggacgacaattgcgcggcggactagcggctaggttgccaggacagtgcgcgtcccgcgacttttatgtgtttcaggctttcagcgtgtgagttgggtcatcggcaagcagc

SEQ ID NO: 5840 - DNA, 104 bp, Zea mays
ttgacatgtttagggctagtttgggagttcaaaaacaggagggggttagaggggctaaaatccccttcttattctgaactcccaaactagcccttagtgtggag

SEQ ID NO: 5841 - DNA, 115 bp, Zea mays
ttttatatttggtgctagcacggcacaatctaaaagttttttttgtttttttctggcttgaacctgtttgtcacgaagaatgataggcttgtgccgggctggcccggtctggcgt

SEQ ID NO: 5842 - DNA, 239 bp, Zea mays
ttggatccgtgtggcaaacagtttgtcggctaattttagcatattggcctctatacgggctggctaataaattgactaattgttagttgtagggctggcaaaatgtttagccattagccaattaatatatgctaatagatcatataaaaaaacatccatcagccaagacttcaaacataccctaagtaattgttgctagctaattatttaccgactaattgttagccactagcaaataa

SEQ ID NO: 5843 - DNA, 104 bp, Zea mays
ttgctgactaaagggccacaacgtgcctaacttttctgtctaagcttagttctccaattcgagcgcctaaagttaggcagattgtggcgccttaggcaggaaac

SEQ ID NO: 5844 - DNA, 104 bp, Zea mays
gggcgtttggttgccttgtccggtggtgcagctgcatctacacatgcaaaaagtagtgtttgtttggttcgttgtatcgcacgagacaggctagcacggaactt

SEQ ID NO: 5845 - DNA, 158 bp, Zea mays
gtgcttggcgctttgccgagtgtttttttttgtcgggcactcgacaaagaagtctttgccgagtgctgcacttggtaaagtcctgctctcggcaacgaccacgtttaccgagagcaggactctcggcataggaaaacactcggcaaagcggtcgattc

SEQ ID NO: 5846 - DNA, 184 bp, Zea mays
agcctgcatcgccatggcaaggtggctactgctgctcgattcggcttagcaggtggcgcgcctcgtccacctcacggcttggcgaatttttttgtattttagcccctaaaccgaagtaaatttacgtttagacctaaaaaaattttaaatgcagttttggaccctttgctcggcgaaaaaaaca

SEQ ID NO: 5847 - DNA, 249 bp, Zea mays
ggtggctgaacacgagtcgagcgagcttacaagccacaagtattttgtccaatcctagttaggactagttaaacgtatctaattgtgacaaagttttagcaaaaatgtgctaacacatacaagtttaaataatgcacagtaattacatatttcataggagaaaaaacgaataccccgtttggatgtaggtattggtacacagaattggaaattggaataagctttcttgaattctgtcgtttggttgca

SEQ ID NO: 5848 - DNA, 122 bp, Zea mays
gtcttgttcgtttatgccggattgtgggtcggaacgatttctaacctattacttctctaatttatataaactttgattaggtagaacaattccgggtgcaatccgacgtaaacgaacaagac

SEQ ID NO: 5849 - DNA, 98 bp, Zea mays
tgtcagctggccaggttgcttagcgccataggctacaacgccgagctgtgttacttcggctccataacctatggcgccgagcaaagggtccaaaatca

SEQ ID NO: 5850 - DNA, 185 bp, Zea mays
gcggtagactttttacatcacaggcggttcggttagaaaacagcttgggatgtcccaggctattcggaccgtctgtaatgtattagtatcacaagcggtttttgtttcggaccgcttgtggtgctctattcgtttcacaaacggaccgtaatgaaaaaactgcctgtgattgtgatttgattact

SEQ ID NO: 5851 - DNA, 128 bp, Zea mays
  unsure (127)..(128): n = A, C, G or T
ataagccatatgaattgttgttaatgtattggtaatgtattgttgttaattgtcgtgctggtattaatatcatataatatataactaggtcattgtccgtgcgttgcgacggtacacaatcacaacnn

SEQ ID NO: 5852 - DNA, 139 bp, Zea mays
cccgacaaagaagcctttgccgagtgtcgcactcaacaaagtactgctctcggtaacgagctcgtttaccgagcgtagcactatcggcacagaaatacactcggcgagtgtcgaacactcggcgacggcggcgctcgac

SEQ ID NO: 5853 - DNA, 83 bp, Zea mays
tctggttttgggtcaagtagactcggtctttgagcatccgtcatgctgcagctcgaggacgagctgcttgtctaggaggggtg

SEQ ID NO: 5854 - DNA, 92 bp, Zea mays
ggctaaatgtgccacactttgcctaagtttagtcgtccgaattgaataactaaccttagacgaaaaagttaggcaaagtgtgataacttagg

SEQ ID NO: 5855 - DNA, 104 bp, Zea mays
aagttaagaacgtgggtacccacgttcctaatacgataagttcgacggttttaccacgggcccacgaatttaatataagaacgtgggtacccacattcttaaat

SEQ ID NO: 5856 - DNA, 149 bp, Zea mays
cggacgggtaaggccttgttcgtttgtgttgaattggtgggtcggaacaatttctaaccggtttgcttgtctaatttatataagctttgattagctgaaacgattccggatgcaatccgacacaaacgaacaaggtctaaagttttctt

SEQ ID NO: 5857 - DNA, 113 bp, Zea mays
acctgtcgcgggtagcgggtgcgtgtacgagtttaatattaatctcgcgggtacgggtttgtaatctctgtacccgcggattttaaacccgttgccatccctaaacgcgagag

SEQ ID NO: 5858 - DNA, 144 bp, Zea mays
cactcgtttcgtggttagttcggctcggctcggctcgtttgaattttttcacgagctgatgtgacatcctagctcgattcgttcgagccagctcggtttgttaacgaaccagctcgcgagctaaacgagctaccacatttcatc

SEQ ID NO: 5859 - DNA, 116 bp, Zea mays
tcactcggggcgcgtttgccgccatggcccagcatcccgggctgcagctcccgtgtttgtgtcgcctggcttgctcgggagccaggctgtgggcgtgcaaatttagcctctcagcc

SEQ ID NO: 5860 - DNA, 149 bp, Zea mays
aagtggattaagggtttgttcgtttgtgtcggattgatgggtcgaaatgattcctaaccgaattgcttctctaatttatataaactttgattaggtggaacgattccgggtgcaatccgacacaaacgaacaaggcttaaaggaggttg

SEQ ID NO: 5861 - DNA, 252 bp, Zea mays
cgcgatcgaggactggcgggacacgtgtccaggacgtgagtgatgcgcacgttgtgcgatacttatggtggtttggtagttgatcctaaaaaccaccctacgctatgaccgatgaattttgctgagtttgggcttcaaaactcggcggaggcggttccggagggagccggtggcggcacgtggcgtcacaacagagagtgcgtcaaggcgaagaaacttcatgtggaacacgtggccgtcagaacgaaaatc

SEQ ID NO: 5862 - DNA, 195 bp, Zea mays
agcaggtgcaagtatgtaagtagagtttttagtctttagatatgtatccaacggtagatacaattgtagtttgttagagagtttttttataaagctatatcatgtggtggtggaagagtttaagtgttaaatatgacatactgttggatctagatctaacggacgaaaaaatctcttgcacctaatacctgattg

SEQ ID NO: 5863 - DNA, 99 bp, Zea mays
gagagtttgacactcggcaaagccccctttaccgaatgtctttctatgtatagtgtctcgctgtcggtaaacgaggctgttgccgagagtcttatttcg

SEQ ID NO: 5864 - DNA, 91 bp, Zea mays
gagtaggccgtaggaagttagtaggggcggctaacttcctagaggaggccgtaggaagttagcggctcgtttgaccgtctgcggtggtcag

SEQ ID NO: 5865 - DNA, 109 bp, Zea mays
tggttcgtggctaaccgtgccacactttgcctaaggttagtcgttcgaattgaacaactaaccttaggcagaaaagttaggcaaagtgtgataagttaggcagcgaacc

SEQ ID NO: 5866 - DNA, 153 bp, Zea mays
tttttcagtttagggcccgttcgtttgcataggaataaacctagattcgttccagctcatcaaaatttatataaatgagagaaataatttggctaggaattattccggatctccaatcagtggaaaccgaacagggccttatagtgctcggat

SEQ ID NO: 5867 - DNA, 175 bp, Zea mays
gaaagtcaaaaggctttgctggatcggatcttgctttcagcctttcagaaagctaaaaactaaccaactgacgaatttcagaaaacaaacagggtaagagagaaaaaaaggtagaatagcaaaagaaaagcttataccctggtgatgtgcccgtgcgttgcttagtgatggtgat

SEQ ID NO: 5868 - DNA, 214 bp, Zea mays
  unsure (84)..(85)..(86)..(87)..(88)..(89)..(90)..(91)..(92)..(93): n = A, C, G or T
  unsure (104)..(105)..(106)..(107)..(108)..(109)..(110)..(111)..(112)..(113): n = A, C, G or T
agatactaggtgcaagcacgcaagaagacattttgattcgttagatctagatccaacgatattcataggggatcctctagagtnnnnnnnnnnagcagcaggtnnnnnnnnnnttatagcatttaaaaaaacctaacaaactacaattgtatctaccgttggatacagatctaacagactaaaaagtctgcttgcacgcttgcacctagtacct

SEQ ID NO: 5869 - DNA, 75 bp, Zea mays
acgattcctaaccggattgtttctctaatttatataaacttatattagctggaacgattccggtgtaatccgaca

SEQ ID NO: 5870 - DNA, 234 bp, Zea mays
tcctaacaccgtccataaggtcatgcgctgccgtactcctgatatggcgtactgctccatccgtccagtatacgggtccctataccatgtgtttggttccgatgctaggcagagcctagttcataagctcatgcaggccaagccaagcctgtattagtggatgcaagtaataatttgtgtggttgtttggttgactgcacgtaactagccaggatttggtgggcacgtgtttgg

SEQ ID NO: 5871 - DNA, 103 bp, Zea mays
tatgaagggggtcgatgccaagatctatggcgccgaccccctgacatgtgttcgtcggtgccacgggtcggcgccaagatctatggcgccgaccccccctgcc

SEQ ID NO: 5872 - DNA, 89 bp, Zea mays
ggggtcggcgccatagatcttggcgccgacccgtggcaccgacgaacacatgtcagggggtcggcgccatagatcttggcatcgacccc

SEQ ID NO: 5873 - DNA, 229 bp, Zea mays
ataagacttatattggctctgtttggcacagcttattttcagcttctttacaaatttaagcagaatttctcctaaacagctagcttccgcagcagcttatcagttcagatgcttctcagaatatactaaaagcagccaacaagcagaagctgcttttcaccagcttatcagataagctgctttttcaacaagcaacagctgtgccaaacagggccattatatgcaccta

SEQ ID NO: 5874 - DNA, 158 bp, Zea mays
tcgtacataccctaagggcttgttcgtttctgtcggattgcacccagaatcgttccagctaatcaaagtttatataaattagagaagcaatccggttaggaatcgttccaacccactaatccggcacaaacgaacaaggcctaaggttttttcttgcc

SEQ ID NO: 5875 - DNA, 132 bp, Zea mays
aaaagatgacgcaggacgaccattgaaactggtgttttaagtatagatatagagaaatagagataaataaatatgcttaattcatatcgtcttttcataggtaggtttggtggtttttctgtgaacatatcc

SEQ ID NO: 5876 - DNA, 140 bp, Zea mays
aaaccagactgtttgcagcccctcacaaaaaggagaatagatcccacctgcaggtgcaacaatacaatcaaaacgtgacctgcagatgaggtctacctcctttctgtgagagaggctacaaacagtctagtttacagtcg

SEQ ID NO: 5877 - DNA, 231 bp, Zea mays
ctcctttgttgttaacactgtgtactcggtttctctggcgctgatccgcgctcgcccatgtcgccatcgtagtatcgtcgctagtgatagcttcgtatcgtcgtcgagtctgtcgaacctcgttcttccctgctcgatctcgtcgaacccgaagcccggacttcaaacaaaaataagcgaggtccatgtgcatcgcttatcaagtgctcggtcgaagactttgatcgaagg

SEQ ID NO: 5878 - DNA, 73 bp, Zea mays
tgggcttctttcctgtggaccatgtgacattgaattaccttaaactgacaggccgcagtgatgaaactgtatg

SEQ ID NO: 5879 - DNA, 211 bp, Zea mays
  unsure (190): n = A, C, G or T
ggtagcaaggatcaggggcggacctacgttatggtgagtgagggcctaggcccctgctcatttctatgatattatgatatagtatagatttttaccatggagtcccctccttgatttaactgagatgcccctgctcttacattttaatccttgatcttgtaagaatgccctcactctaattttatcctangtccgcccctggcaaggatgg

SEQ ID NO: 5880 - DNA, 101 bp, Zea mays
ctggcccgacacagttagcaggccggcatgacgtgcatgtgccatagttgtggcccgcgtgtatctagcccgtgtcggacgtcgttatgctgatttaatta

SEQ ID NO: 5881 - DNA, 189 bp, Zea mays
tgaataaggggtgttggtttctaagaactaatgtttagtcccatcattttattccattttaatctataaattgtcaagtttagaaactaaaatatagttttagtttctatatttggcaattttggaactaaaatggtataaatgtatggactaaaaattagtccctagaaaccaaacgccccttaagtc

SEQ ID NO: 5882 - DNA, 253 bp, Zea mays
ggccgggaaggccgtggcagcgacggatccagcgaagacgatgaagagggtgggtgacatgtctaagtgcatgtctaagttctacttctaattatgatgtattggtgtttttcctatgttgtttaaaactacgtttaaacaaagtttaaacatttaaaagtcaaaattttaccatgagcgttccaacgttttatcgttttaataaccttgactagttatatacccgtgcgttgcaacggcaaacaaattgatg

SEQ ID NO: 5883 - DNA, 213 bp, Zea mays
caaagcaacttaggatgtgtttggttgtaatgacagaacgagatgagataagacgatccctcacataaggttgtgtgttttatggtcaggggttagaacaggattatcccagtgttgtcccttaaaattgaagggacgagagaggacgtcaggggacgtccctgttctgtctgtcctcatatgtcccgcaaccaaacacatctttcaattaga

SEQ ID NO: 5884 - DNA, 208 bp, Zea mays
tactctattaagaacggagcgtcaacgtccacacctagcgtgcctccgcctctcccccgcgtgtgccctcgtccctgcctctccctgcccgtagctaaggtatatgtccgtacgggcggcgcggacggattgggcgaagacggggcacgcacttgggagagacggggcacgctaggtgtgggactgaccatccgttcttcatagagta

SEQ ID NO: 5885 - DNA, 228 bp, Zea mays
tgtttgtataagagcatctccaacaatatctcggtgtccaaaattgaaacatagggctctatgcagtaaaaattaatccaacagtcccgcatttataaaatttggtaaaaaattataggataccctctcaagtaccttaaatatactacactgtcatgagctgcattagaatctagatttgagattttattgttggaacgaaatattttgttgatgccataaattcta

SEQ ID NO: 5886 - DNA, 134 bp, Zea mays
gcagagagcggcgttggcacctggtggcagacgccggcgtggtcaccttagactgtgttcagcggttacacctaaatttgtccccctaaatttgtccccttatatcccactcacgtgtcacgtcagcgttctct

SEQ ID NO: 5887 - DNA, 236 bp, Zea mays
cgtaaacagaccgtacttgtgccagcacgtgggccacgaactcggcccaagcacgacctaatacacaattttgggtcgacccaacccaaaattattttgtaccgtgtcgtgcttgggtcttatttttcttttcatggtttcgactagtctaccaggcttgacctaaatgtacacctctaactcagaccagcacaagcacatgaaccacgacctcggcccaagcacgacccgataca

SEQ ID NO: 5888 - DNA, 169 bp, Zea mays
cgacgttttggaggcgtaggcgagggattagctgatatagaaaagcagggaatagaccactcgctaaaacgaacaagaacactctattacttggtaacctctttgattaaaaccatagatactcacgtcgtctacatctgttatctctctcctagcagccgtcgttctt

SEQ ID NO: 5889 - DNA, 130 bp, Zea mays
aaggctaagggctgatttggtgaccaggaatcacgagatgagtaatccctttgctgttcgaaattgaataggagattcctcctcatggatcacctcatgatctctggtcaccaaaccagccttaaaggaa

SEQ ID NO: 5890 - DNA, 163 bp, Zea mays
ggcggcgtgggcgtgggcgtgggcgtgggcgagattgcgggcgtgcgcgagatctgggggcgagggcaggacggacttccatgcgcgggcgtgggagggagcggaggatgtcgcgggaggcagaaccgtggtgtgtgcacgcctacactacgtccttaagaga

SEQ ID NO: 5891 - DNA, 136 bp, Zea mays
tggacgaaatgctcgtggctggctcgtttggtttatggtcggttcagcttggattggctcgtttgaattttttcacgagctgagctgatatcctatctcggttcgttaacgagccagctcgcgagctaaacgagct

SEQ ID NO: 5892 - DNA, 136 bp, Zea mays
taggtgaatgcccgtgcgttgcaacggaaatatataatacaacgataacttatgtacaaatatgtaatatattgttatgagaaaaggtcctcaagcacttatttgatctgagcgacgacgatggagacttcaccgg

SEQ ID NO: 5893 - DNA, 144 bp, Zea mays
tggctcgataacactcgacaaatgctttactgagtgtgcttggtaaataggactcggtgaattatacattgacaacagtctctttatcgattcctttatatcggacactcggtaaagactttgccgagtgtcaactggtgctcg

SEQ ID NO: 5894 - DNA, 95 bp, Zea mays
ctgttcttgctcgcgagctaaacgagccaactccagctcgtaaacgagccgagtcgagctgactctatggctcgttagctaacgagatgggacga

SEQ ID NO: 5895 - DNA, 111 bp, Zea mays
ttggttggtggctaaatgtgccacactttgcctaaggttagtcgtttaaattgaaaaactaacattagacagaaaagttaggcaaagtgtggcaagttagtcatcaaacca

SEQ ID NO: 5896 - DNA, 114 bp, Zea mays
cttcatcagtgcgatggcggacttgttgtccaccttgagcttgggagcgagcactgctcctccgatgagctcagccagcagccgtgccaaccagactgcctcgcacgcggccgc

SEQ ID NO: 5897 - DNA, 221 bp, Zea mays
catacattaaggagtatttaattgttatatcatcaccggagtttttgcaaaagtagtcatcattgttcggaatgcagcggaataaaactaacgataagtaaacggaaggatggggaagcctgtcccatcactcctcgtgctcctcctcagctgaggtagggtcccactcgactatccatcccggtggcaagatggacggccaagtcactccagcaaccata

SEQ ID NO: 5898 - DNA, 147 bp, Zea mays
aattctctaagttattgttcggttatttccattatatataggttagatatgattagaaaaattttacaaaaactttaactttttaggatttaaacccacctaacccatatgaattaagagctaaccgaacaagccgtgagtctgcac

SEQ ID NO: 5899 - DNA, 130 bp, Zea mays
gtttacacatctcggcgccatagatcttggcgccgagctacctgtcgcgttgtcgtccaccagttgacgcggcgccgacgtggcaccgagctcggcgctaagatctatggcgccgagctcgaatatataa

SEQ ID NO: 5900 - DNA, 127 bp, Zea mays
tatattcgagctcggcgccatagatcttagcgccgagctcggtgccacgtcggcgccgcgtcaactggtggacgacaacgcgacaggtagctcggcgccaagatctatggcgccgagatgtgtaaac

SEQ ID NO: 5901 - DNA, 74 bp, Zea mays
ttgtcaatcaggctctacgcatgcgaagtatgtgtttggttacctgcgtgcagatgtggagccagactcgcaca

SEQ ID NO: 5902 - DNA, 120 bp, Zea mays
aggacttctaaggtcttgttcgtttgtgccggattgcttctctaatttatataaactttgattagctggaacgattacaggtgcaatccgacacaaacgaacaaggtttaataccgaaat

SEQ ID NO: 5903 - DNA, 152 bp, Zea mays
taggaccgattgaggccttgttcgtttacgtcggattgcacccgaaaccgttccagctaatcaaagtttgtataaattagagaaacaatccgggtaggaatcgttccgacccaccaatccgacgtaaacgaacggggcctgagggagcaaaa

SEQ ID NO: 5904 - DNA, 82 bp, Zea mays
tgtatttcgggtatccgacccgataggacccacgggtgagtttttgtacccgtatccatatccggtgggtacgaaatccgcg

SEQ ID NO: 5905 - DNA, 115 bp, Zea mays
gcaccctccatatctaacggtgttgcgtctattttgtaaagaagcctctacactcttgctctgtacattttacaaaaacctcccctgacgcagcaccattggatgtggagggtat

SEQ ID NO: 5906 - DNA, 135 bp, Zea mays
aatccagaccgcaccctccatatctaacggtgttgcgtctattttgtaaagaagcctctacactcttgctctgtacattttacaaaaacctcccctgacgcagcaccattggatgtggagggtatggtctggatt

SEQ ID NO: 5907 - DNA, 228 bp, Zea mays
cttgagactaagaccctgtttggcacagctactacttgttgaaaaagcagcttatctgataagctggtaaaaagcagcttctgcttgttggctgcttttagttcattttgagaagcagctgaactgataagctgctgcagaagctgtctgttttggcagaacttcagcttaaaatttatgaagaagctgaaaattagctgtgccaaacagggcctaaaaggctttgtg

SEQ ID NO: 5908 - DNA, 67 bp, Zea mays
tgccacactttgcctaaggttagtcgtttgaattgaataactaaccttaggtagaaaagttaggcaa

SEQ ID NO: 5909 - DNA, 72 bp, Zea mays
agaaatttaacgacttatggtcggtcgctatagaggtaaatgtgtgactgatggtgggtcgctataggggta

SEQ ID NO: 5910 - DNA, 92 bp, Zea mays
ccgtgcctaccaattaaccgtgccgggctcgtgcctgcaccgcggggccgacggccagcccaagcccggcacggctattgaaccgggccgat

SEQ ID NO: 5911 - DNA, 206 bp, Zea mays
caagcgagccgctaacttcctagaggcagccgtagcaagttagcatgggcagctaacttcctatggcctcctctaggaagttagtttttagttgctgatccgcagttgtggtcaaataaaaagctaacttcctacggccggctctaagaagttagcatggacagctaacttcctacggcctcctctaggaagttagatttcagctt

SEQ ID NO: 5912 - DNA, 90 bp, Zea mays
gaggtttccggcgtgcgcaggcgtgcggagctgtgcggtggtgggcggatttggcggcgaggtttccggcgtgcgcaggtgggcggaggt

SEQ ID NO: 5913 - DNA, 196 bp, Zea mays
acgccggtgctcccatgtgcaaaatgtatccaacccatccgtccaatatccaacggtgtaccgggtattttttaatgaacaacactaacgtggagagcgtgggaggacttatttgcaaaaatgtcataacacattaacaccgttggatacagaacggatgagttagatgcattttgcgcatgggaacaccgacgtc

SEQ ID NO: 5914 - DNA, 86 bp, Zea mays
gaacccgaaactcggcgtcatagcctacgataccgaggtaacacagttcagccccataggctatgacgccgagctctgacgtggcg

SEQ ID NO: 5915 - DNA, 255 bp, Zea mays
taatttatataagagggtgtttggttgctgctgctaaagtttagtacgggtcacatcaagcgtttgacttttaaataggagtatgaaatatagacccaaccaactgtactagattcatctcgtcttttaatcttcggctgacaaattagttttataatccgactacatttaatacccgaaacggaggttcaaacattcgatggaacaggggctaaattttagcggggtgtaaccaaacaccccctaagttttggt

SEQ ID NO: 5916 - DNA, 86 bp, Zea mays
gggagtcgagcaggggatgacgggttcgacgacttgactgtgaacgacacaaggacgaacgacgacaaccggtgagatcgacgaca

SEQ ID NO: 5917 - DNA, 191 bp, Zea mays
tgttgtccatcgtcgagcaagaagacctcatggtcattgtcaacgtcggtgactctcgggttgttctggacaacacatccaacaacggcgccatcacgccgtccagctcatcgtccaactgaaacctaacctgccatataagtcgctactgatcggccatgaattcttgtgcgctgggacgatggtcatta

SEQ ID NO: 5918 - DNA, 203 bp, Zea mays
tgggcacgtaatgggcctgtttggtttgtgtcaaaatgtgtcacactttgtctaagactagtcgtccgaattgaataactaaccttaagcataaaagttagacaagatgtgataagttagtcagtaaaccaaatatatcctatatgtcctcgctcggcatgacctatcccggacacgaattaggcatggcccgaattaggcag

SEQ ID NO: 5919 - DNA, 111 bp, Zea mays
tttatacttggcaaagcctttgccgagtgttcggcaaacattttatcggcaaagggttctttgccgagtactttttttcggacactcagtaaagactttgccgagtatcga

SEQ ID NO: 5920 - DNA, 246 bp, Zea mays
taaattttgattagctggaacgattccggttgcaatccggcacaaacaaacaaggtctaagggcctgttcggttattcaggaatctactccaggaaagattccaactggaataattgtataatttgtagtataaattggtaacctgaaatagttcctagccttttccagcctaaccaaacagtgtctaaggtcatgttcgttttggttggattgcacccagaatcgttccagctaatcaaagttta

SEQ ID NO: 5921 - DNA, 142 bp, Zea mays
aacactaagggctgatttggtgaccagggaattgaaggaatccataggagaggaatcctcttgttattcaattttaaatagaagggaattcctcccatggatcccatccatttacctgatcaccaaaccagccctaagtaaa

SEQ ID NO: 5922 - DNA, 167 bp, Zea mays
ccgctctaaggtcctgtttggcacagcttattttcagcttcttcataaatttaagcaaaagttttaccaaacagccagcttctgcagcagcttatcagttcagctgcttctcagatacactgttttttcaacaaacagcagctgtgccaaacaaggcctaatcagac

SEQ ID NO: 5923 - DNA, 148 bp, Zea mays
gagcttatttaggccttgttcgtttgtatcggattgcacccggaaccattccacctaatcaaagtttatataaattagagaagcaatccggttaggatttgtttcgacccatcaatccgacagaaacgaataaggccttaagatgaaa

SEQ ID NO: 5924 - DNA, 146 bp, Zea mays
ccgctcctccacctcgtcgcagcccccaaggccccaactacccccagtctcggaagagaactatccagaagcgcaagactccaaagccgtcgccttcctatccatcccttcctcgccgcgggggtcgcctgaggtatgctacctac

SEQ ID NO: 5925 - DNA, 153 bp, Zea mays
agacgtccccatcgtcgtcgtcggccacggccgccccctccaccacgacgcacgtcttgggactcgacagctcgtcgagaacggttctcggaccgagcggagcgtacgagtacgaccaggcgaaagcggagctcgacgacggcaggggcagcg

SEQ ID NO: 5926 - DNA, 226 bp, Zea mays
  unsure (181)..(182)..(183)..(184)..(185)..(186)..(187)..(188)..(189)..(190): n = A, C, G or T
gcgaagtagcccgcgcttggggtcgacttggcttgtctttcgcatcacgtggttaattcacgtacctcggttatgccttggtgtggaggtaaacaagacatcgtggcacacggaataagctcagggcgacatcagaaacactggactcttgttgcaaagtcgaggtgatatttgagacctnnnnnnnnnntttgagacgaagtcgatgttggccggtgttacagag

SEQ ID NO: 5927 - DNA, 133 bp, Zea mays
atgtagtatctcattctaacagactctccaacatgcaagtttgtttggatagccgaagtggctagccaagtttggatagtgaggcggatatcttggcgagttgaatggctagtctgtttgagttattttgcta

SEQ ID NO: 5928 - DNA, 149 bp, Zea mays
gaatttgctaaggccttgttcgtttgtgacggattggtagttcggaactatttctaaccgtattgcttctctaatttgtataaactttgattagctggaacgactttggatgcaatccgacacaaacgaacaaggactaagttgtgtcg

SEQ ID NO: 5929 - DNA, 149 bp, Zea mays
ggaatttgctaaggccttgttcgtttgtgacggattggtagttcggaactatttctaaccgtattgcttctctaatttgtataaactttgattagctggaacgactttggatgcaatccgacacaaacgaacaaggactaagttgtgtc

SEQ ID NO: 5930 - DNA, 258 bp, Zea mays
cgggggatgttagactatgtgtgtgggtcggcaccactgttgggctatcggcccattagggttagggtttcccctgagtctatatatgtaaccttcctctatgcaatagatatagagtttcattctccaatagcatggagccatgaagtatgtgaaggcactgtaatgagttcataaacacctataaagctaggacaataatacacaaaaataacatgaacctattcaaggattcaccacaagtaataacaccaaatg

SEQ ID NO: 5931 - DNA, 183 bp, Zea mays
tatacactttgttgcccttagttttgttggtgttcttacttttatctttagttgtgtttttttagttttgtccttccagtgctatagaacatgctatacaacagaagcactaaaccgagaaaaaacacgactaaggataaaagtgagtacaccagcaaaactgagggcacacgcttaaaaaac

SEQ ID NO: 5932 - DNA, 117 bp, Zea mays
aacctattactccctccgtttctttttatttgtcgctgttgcactatccagcgacaaataaaaagaaacggagggacaacagcgacaaataaaaagaaacggagggaatacaagtga

SEQ ID NO: 5933 - DNA, 222 bp, Zea mays
tatttagaaatattaactatagtttaactataaaattaattacataaataaagactaaatgacaagtggatctattaagtctaattagtctatagtttttttgatactatggtaaatatttactaatcatagattaattatgtttaaaaattctttagtcatttacttctcatctatgtaattagttttataattagaccatatttaatactcatacccgtc

SEQ ID NO: 5934 - DNA, 67 bp, Zea mays
ctcttttagatccaaatggtttaggattaggctgcatatgaaattctaatccgtttgaacttaagag

SEQ ID NO: 5935 - DNA, 163 bp, Zea mays
cgatggaggagaggctgaagctgagtcgcgacagcacgacggaggaggtggatgctactcagtaccagcgtctcgtggggagccttcgctacctcgtccacacacggcctgacttggcatactccgtcggctacgttagtcggtttctgcagcgaccgacgac

SEQ ID NO: 5936 - DNA, 105 bp, Zea mays
cccgaagagattgacagaagagagcgagcacctggcgcggcgaccggcatggaacgcatgccgtccccgccgcgtgctcgcttctctttctgtcagcctctccct

SEQ ID NO: 5937 - DNA, 88 bp, Zea mays
tgttccgcctgctcttcccgccgttccagaagtacatcaccaaggggtacgtctccgaggaggaggccgggaagcggctggcgcaggt

SEQ ID NO: 5938 - DNA, 68 bp, Zea mays
gggaccgtctgtgtctatgatttgtgggtccgatggcatactgggcgaagcccacaaatgataaggca

SEQ ID NO: 5939 - DNA, 157 bp, Zea mays
tgttcgtttgtgtcggattgatgggtcggaacgaatccgagctggattgcttctctaatttatataaactttgattagccggaatgattccgggttaattagagaagcaatccggtccggaatcgttccgacccaccaatccagcagaaacgaacaa

SEQ ID NO: 5940 - DNA, 110 bp, Zea mays
agctatattacctcccgttctcgttatcccgctagttcatttttaacgaaacagtgacaaatatgaactaaacagcaacaaataaaaagaaacggaggggtactacgctt

SEQ ID NO: 5941 - DNA, 198 bp, Zea mays
attgaatatagttggattgtaaaactaattacacagataataactaacgataagacaaacctattaaatctaatcagtccatgattcacacatataatgtaaacatttgctaatcatggattagttggctttaataaatttgtctcgtcatttagtcttcaactccgaaattagttttataatttgactatatttaat

SEQ ID NO: 5942 - DNA, 138 bp, Zea mays
agtctgtccagatagccaaggatgacttgcctgtggcttcttggcttggcttggctcgggcaaaaccttgtgcacgttttattgctcgcctcgtggcctcgatcacaggcagtctccttggctagtccgggcgggccc

SEQ ID NO: 5943 - DNA, 219 bp, Zea mays
cggtagaatggacggctgagatcgcagaatggcagaacaccaaaaaaggcagggctactatagctaaacttaataagtagtaggagatatataatttttcagacaaatacccaatgcacataatcttgtttcagggtgtctcaaatgagaacaaaaaactgaaaagggatttggtgaaggactgttttgtacttttgtttctcaacttccaaagagctt

SEQ ID NO: 5944 - DNA, 206 bp, Zea mays
gcgaaggatgcggacgcccgcgtccgggtgaggcgggaggttcggtcgtcgcaagcaaggcaggtgggttttgttgacatagatctaggcaagcacgctgggtaagcggaggatgcggacgcccgcgtccggcgatggcgggacatcatgagagggcgggggaaccgcggcgtgcgtcgcggggatagggcggacgcaggggcggg

SEQ ID NO: 5945 - DNA, 71 bp, Zea mays
atagctcggcgccataggctgtggcgctgagctatgttagctcggcgccacaggctatggtgccgagctaa

SEQ ID NO: 5946 - DNA, 85 bp, Zea mays
ttggacccttagctcggcaccatagcctgtggcgccgagctaacatagctcagcgccacagcctatggcgccgagctatgacgtg

SEQ ID NO: 5947 - DNA, 141 bp, Zea mays
ggatttaagacctgtttggttcgtggctaactgcgccatactttgcctaaagttagtcgttcgaattgaagaactaaccttagacggaaaagttaggcaaagtatgacaagttaggtaacgaactaaacagacccttagac

SEQ ID NO: 5948 - DNA, 142 bp, Zea mays
gtctaagggtctgtttagttcgttacctaacttgtcatactttgcctaacttttccgtctaaggttagttcttcaattcgaacgactaactttaggcaaagtatggcgcagttagccacgaaccaaacaggtcttaaatcca

SEQ ID NO: 5949 - DNA, 114 bp, Zea mays
ttgcagccctcacaaaaatgaggatagactccacctgcaggtccaccagataacgttttagttgtgttattgatctgcgggtaggacctatccttatttttgtgaggggctata

SEQ ID NO: 5950 - DNA, 169 bp, Zea mays
tgatctaattcatcgtcttctcactcctcacttttttgtttggtttgtggaatggattgagttgattcatcatcacctcatttcttatagttatttagttagtactaatatgaggcatgaggtcatcccaccaaatttgaggaatggacccatgatgcaccaccacatt

SEQ ID NO: 5951 - DNA, 171 bp, Zea mays
cactacatacatcatgttcgaggacactcacacaacgtcagcaacgtccatcatcccagcgcacaagaattcatgtccggtcagtagcgactttacgtggcagttgggcttcaggtggacgatgagctggacggcgtgatggcgtcgtcgtcggatgcggtgtccagaaca

SEQ ID NO: 5952 - DNA, 118 bp, Zea mays
aggactttctagctcggcgccaagatctgtggcaccgagctaggagggcacgtccctagccgccgacgccacatcagagctcgatgctatagcctatgacgccgagttaagggtctaa

SEQ ID NO: 5953 - DNA, 100 bp, Zea mays
cttctccccctcctgcctcgatgccggcggcgaagcgcgccggatcgagggctcgagcccggaagaagcagtcgccagcgcggggtacgaatgcggggaa

SEQ ID NO: 5954 - DNA, 134 bp, Zea mays
actaggtagatgcccgtgcgttgcaacggtatataaaatattcaacaaaatgttagtgcataaaaaagaacacatatttcaattgcaccaaaaacgatacattccccgcttgcaaggttagggccgtattttct

SEQ ID NO: 5955 - DNA, 231 bp, Zea mays
  unsure (128)..(129)..(130)..(131)..(132)..(133)..(134)..(135)..(136)..(137): n = A, C, G or T
ctacgctcacagaggtggtaatggctctagattttatactacaaactttaaggatcgaatcggattacgatcggaccctagtattattcatttttcaactaaaattatttaaatcccttaatttttcnnnnnnnnnnttcttattcatttttgaactaaaattatttaagggccttaatttttctgaaaggacatttggatcgtgatccattaccacccctactcataccc

SEQ ID NO: 5956 - DNA, 111 bp, Zea mays
tgcagcccctcacaaaaatgaggataggtcccacctgcagaccaataacacaattaaaacgttatctggtggacctgcaggtggggtctatctcatttttgaatcgaattt

SEQ ID NO: 5957 - DNA, 253 bp, Zea mays
ataactgaaacgcctaaaaggctaatcgtgtgagtaaggacctagtaatttttctacctcctgcgaaagggcctctagcctagtggttaaggacttccgagtagctcctccaaatcctgggttcgattcccctcgggagcgaattttcaggcttggttaaaaaaatcacctcgctgtgtcctatccgctctcgggttacgatgtcctgtacgccaccctccggttggaccgttgcagagtggacagatgacgc

SEQ ID NO: 5958 - DNA, 96 bp, Zea mays
gttagaatttgttctaggcctccattccgaaacaaacgaacggccccttaggcttgttcgtttgtgccggattggtgggtcggaacgattcctaac

SEQ ID NO: 5959 - DNA, 144 bp, Zea mays
gttacttagggcctgtttggttcgtggctaactgtgccacactttgcctaaggttagtcgttcgaattgaagaactaaccttaggcagaaaagtgaggcaaagtgtggcaagttaggtagcgaaccaaacatgcccttattacg

SEQ ID NO: 5960 - DNA, 236 bp, Zea mays
caggttaggttggtgcacggttctgccataccccctcctccgcgattcgcgtctctgccgccatgcccgctctccatcgaaggaaggcgccattccagggattaccgcaccattctcgccctcgtccgctctccggcaccattccagcattccagggattaccgcctccccctcgatccgcggcactctcccccgtccttctcgagtatggcaccgccagtccgcctcgcgacccc

SEQ ID NO: 5961 - DNA, 136 bp, Zea mays
tttagggcatgtttggtttgctgcctaacttgccacactttgcctaacttttctgcctaaggttagttcttcaattcggacgactaaccttaggcaaagtgtggcacagttagccacgaaccaaacagacccttag

SEQ ID NO: 5962 - DNA, 150 bp, Zea mays
cacggaactaagggtctgtttggttcgtggctaactgtgccacactttgcctaaggttagtcgtccgaattgaagaactaaccttaggcagaaaagttaggcaaagtgtggcaagttaggcagcaaaccaaacatgccctaaatctcttg

SEQ ID NO: 5963 - DNA, 92 bp, Zea mays
ttacaatcacaggcggttttgtcttagggtccgcttgtgaaaaggatagagcatcacaggcggtcctaaacaaaaaccgtttgtgatactat

SEQ ID NO: 5964 - DNA, 102 bp, Zea mays
atctgatgaccggacgaaaccggtatgagcccggttcactatgtgtcgtgtcaggtttaggtcgaaccaaactcgtgctggatttcggaccgttcgttaaac

SEQ ID NO: 5965 - DNA, 144 bp, Zea mays
tagattaagggtatgtttagtttcctggctaacttgtcacactttgtctaacttttctgtctaaagttagttcttcaatttaaacgactaaccttaggcaaagtttgacgtagttagccacgaaccaaacatgctataaatcta

SEQ ID NO: 5966 - DNA, 93 bp, Zea mays
atctgaaacaatttcggatgtaatccggtataaacgaataaggccttagaccttgttcgtttgtgtcggattgcactcgaaatcgttttagct

SEQ ID NO: 5967 - DNA, 100 bp, Zea mays
gtccccacacgtggccgccgacgacgacggcgcgggcggggagaacctgaccgggcgcgtcgcgccctcattgtcgacgacgtcggccgcgaaccgcacc

SEQ ID NO: 5968 - DNA, 201 bp, Zea mays
taagaacgtgggtaccgtcgaacttaatgggcagccctcgctgactcacgcaggacccataagttcgacggccacgtggccccgtcaaacttaaatgtaagaacgtgggtgtcgtcgaacttatgggaaaaaatcgacggcccccgtcgaacttaaaaacccacgttcttaaccttaagttcgacggtacccacgttatta

SEQ ID NO: 5969 - DNA, 120 bp, Zea mays
gtttgcagtccctcacaaaaaggaggatagaccccacctgcaggtccaccaggtaacgttttagttgtgttattgacctgcgcatgaggtctatcctcttttttgtgaggggctgtaaag

SEQ ID NO: 5970 - DNA, 207 bp, Zea mays
aaaatatatgagcacttgaaccgcagcccgacttctgcatgggcactatatccctatttataggatcagctcggcgtacaacttctaaagaaattacatttatgtcccaagttctatacatacaacctatagagcccgtcgagggtattatggtaccttttctccttaagccatgttgggtatgctgctcaagttctcgttcgtctc

SEQ ID NO: 5971 - DNA, 72 bp, Zea mays
aaaattcaaacgggccaggctgaaattcaaacaattcggatcttttcgggcttgggccggactggacggccc

SEQ ID NO: 5972 - DNA, 192 bp, Zea mays
tagttagtgggtgtttggtttatagggactaaacattagtccctccactttattctattttagtttataaattgttaaataaggaaactaaaatagagttttagtttctatatttagtaaattagggactaaaatggaataaaattgagggactaaaaattagtccctagaaaccaaacaaccccttagttg

SEQ ID NO: 5973 - DNA, 143 bp, Zea mays
caattaaagggatgtttggtttctagggactaaaaattagtccctagaaacctagtttctgtatttggcaatttagggactaaaatgtaataaaatgaagggactaaaaattagtccctagaaaccaaacatcccctaagatc

SEQ ID NO: 5974 - DNA, 127 bp, Zea mays
atttagcttcctaagggccagtttggtaactctatttttctaaagaattctatttttctaagttcgttaaaaaatgaaatcctttttaaaagtaatgttgccaaactagccctagaggatgataatg

SEQ ID NO: 5975 - DNA, 68 bp, Zea mays
ctcttgtcggccggtcatgtgatgagtggcgccgatgtcgaggcaccatccttcgatcatgtctttgt

SEQ ID NO: 5976 - DNA, 150 bp, Zea mays
aaaaattattaggccttgttcgtttacatcggattgcacccggaatcattccggctaatcaaagtttatataaattagagaagcaatccggctcggattcgttccgacccatcaatccgacacaaacgaacaaggccttagtgtaattag

SEQ ID NO: 5977 - DNA, 140 bp, Zea mays
actaaaggtatgtttggtttgctgcctaacttgccacattttgtctaacttttctgtctaaggttagttcttcaatttagacgactaaacttaagcaaagtgtgcacaattagccacgaaccaaacaggctctaaagctg

SEQ ID NO: 5978 - DNA, 189 bp, Zea mays
tgccctccgtccgcgccagattggcctccacctgcgcagcctgcgccttggcgagggcctcgttggtctccctcctctcccccgccaattggcgccggaggtcagccttctccacctctagcgcggccaccttgtccgccagcttgcggcacttactgtcggcggccgatttttcacggacggcgtccg

SEQ ID NO: 5979 - DNA, 146 bp, Zea mays
ggtcgatgcctcctcgtgagacggcgggcgcagcgcgatcttccggcggcgctggtgaggggggataccgggataggcgagctggagctgaggcctggtgaagtgggatttgctgggactggccgactgggagagagggcggcccg

SEQ ID NO: 5980 - DNA, 175 bp, Zea mays
ttagcccctatcacatcgaatgtttgaacctccgttccgggtattaaatgtagtcggattataaaactaatttgtcagccgaagattaaaagacgagacgaatcaagtccagttggttgggtctatatttcatactcctatttgaaagtcaaacgcttgatgtgagccgggctaa

SEQ ID NO: 5981 - DNA, 222 bp, Zea mays
tgtttggttaccccaaactaaactttagcccctatcacatcgaatgtttgaacctccgttccgggtattaaatgtagtcggattataaaactaatttgtcagccgaagattaaaagacgagacgaatcaagtccagttggttgggtctatatttcatactcctatttgaaagtcaaacgcttgatgtgagccgggctaaactttagcaggggcaaccaaaca

SEQ ID NO: 5982 - DNA, 210 bp, Zea mays
gtagggttaagggcctgtttggtttgatgcctaacttgcaacactttgcctaacttttctgcctaaggttaggggcttatttggtttgtggctaactatgtcacactttgcctaaggttagtcgtccgaattgaataactaaacttaggcagacaagttaggcaaagtgtggcaagttaggcggggaaccaaacatgccctagttcttca

SEQ ID NO: 5983 - DNA, 166 bp, Zea mays
  unsure (1)..(2)..(3)..(4)..(5)..(6)..(7)..(8): n = A, C, G or T
nnnnnnnnaggtctgtgttcttggagtgtgctatggagttacagaaagtctgtaacactcatgcaagagactctgtttgagacatttgttagagttgctctaacactcatattttgtcaaatattttgtacgccgttgcaacgcacgggcacatacctagttacaa

SEQ ID NO: 5984 - DNA, 253 bp, Zea mays
agaaatccatagcgggagagcaagcagaccggggggaaggacacgagaagcagaagaacctgagctaggccatcccctggccggggagggtgggttcttcgcagagatttgcttcccgcattccgtagcttgcttcttctcgattgcgagttggatcgcagagacggagcgtttagggggctactccctctggcggagcacgtttgatctgcgtgggtgcctgccgtcttcttcctctccaccaatctactgc

SEQ ID NO: 5985 - DNA, 144 bp, Zea mays
tgtatttcgggcatgtttggtttgatgactaagtcgccatattttgtctaacttttctgcccaagattagttcttcaattcagacgactaaccttaggcaaagtgtgacacggttagccacgaaccaaacaagcccttcatgtc

SEQ ID NO: 5986 - DNA, 181 bp, Zea mays
aatttggtgcagccggctgcaaaccaggatacttacagcctctcacataaaaaaaattgagcctatctacagcagcaataacataactaaaacgttatctattggacctgcaggtagggtcaatcctccttttttatgaggggctgcaaatattctgatttgcagccgactgcaccaattt

SEQ ID NO: 5987 - DNA, 89 bp, Zea mays
agctggcccaggcggcgtagtcggggttgcccatgacggtccacccaatcgtgccgcccacctcgtacacggccgccgacgccacgccc

SEQ ID NO: 5988 - DNA, 163 bp, Zea mays
gatggctatagggggtgtttggtttctaaggactaatatttagtcccttcattttattccttttaagttttagtttctatatttggtaattttggaactaaaatggaataaaatgtagggactaaacattagtccctacaaaccaaacaccccaatagttgca

SEQ ID NO: 5989 - DNA, 138 bp, Zea mays
agtttggaaaccacaaaaccggagaggattgaggagctagaatcccttctttttagaatcccgttcttatttaaatttgaataaaaagaaaattctagcccctccaatcccctccggttttgtggctcccaaattagc

SEQ ID NO: 5990 - DNA, 141 bp, Zea mays
gctaatttgggagccacaaaaccggaggggattggaggggctagaattttctttttattcaaatttaaataagaacgggattctaaaaagaagggattctagctcctcaatcctctccggttttgtggtttccaaactagc

SEQ ID NO: 5991 - DNA, 115 bp, Zea mays
ccacaaaaccggaggggattggaggggctagaattttctttttattcaaatttaaataagaacgggattctaaaaagaagggattctagctcctcaatcctctccggttttgtgg

SEQ ID NO: 5992 - DNA, 249 bp, Zea mays
cagggtgttacatgtgtttggaatggctccaggttccagctccagtgtggagttgtagtttataatatcattttaattagttttaaaaatatttttaatctaaataataaacaaattggcttatctaaatatcttctaaaggcttattgctctaactctacaattttttagagcgtttaatggcctgctcctctaactctaccaaatttaatagagctggagctatcccaaacagtgcctaaaaataca

SEQ ID NO: 5993 - DNA, 140 bp, Zea mays
atatccttaaggactgatttggtgacccgggatcccgagaagaagaaatcctcttgctattcaaaattgaactacaagggaatttctcccccatggttccccttgggatccctaatcaccaaatcagccctaaggtatgt

SEQ ID NO: 5994 - DNA, 104 bp, Zea mays
cttggtctataagggctgatttggtgacccgaaaaatagaggtgattccttctccatgtatcccctttattttcctggtcatcaaaccaactctaagagctagt

SEQ ID NO: 5995 - DNA, 93 bp, Zea mays
ccgtatcctaccctaatgtatttatctcggatacgggaccggatacgggtagttaagattcgggacggatacaggacgggaccgggtaataat

SEQ ID NO: 5996 - DNA, 160 bp, Zea mays
  unsure (41)..(42)..(43)..(44)..(45)..(46)..(47)..(48)..(49)..(50): n = A, C, G or T
gaggagagcgggagatgaagggcgtcgggggcggcgcggtnnnnnnnnnntttgcctccccgggggactatgtctacttcaatctgtcgtcccgctccacaagatctccgtgagttcgcgcgcgcctcgcctccctccctcccatctcactgcagtctct

SEQ ID NO: 5997 - DNA, 148 bp, Zea mays
tatgtatttagggcctgtttggtttgatgactaacttgccacactttgcctaacttttctgcctaaggttagttattcaattcgaatgactaaccttaggcaaagtgtggcaggtttagccacgaaccaaacagccccttagatttaa

SEQ ID NO: 5998 - DNA, 141 bp, Zea mays
gcttttaagacctgtttggttcgtggctataactgtgccacactttgcctaaggttagtcgtccgaattgaaaaactaaccttaggcacaaaaattaggcaaagtgtggcaagttaggcagcgaaccaaacatgcccttag

SEQ ID NO: 5999 - DNA, 154 bp, Zea mays
atctccgacggctgtctacgatgccgtcggacatagcgttatgtccgacggccaccaagcactctcggaaatatcgccttatctccgacggctaccctgacagccgtcggacataagcttatgtccgacggcctcgtacgtagccgtcggaggt

SEQ ID NO: 6000 - DNA, 145 bp, Zea mays
ttgctgccgccgctggccgccttctccgccgccttcttgggcaggagcacgtggcgcgggatgatgcgcgtcttcttgttgtctttcgccgcgttccctgccaactccagaacctcggcggcgaggtactccaggacggcggcga

SEQ ID NO: 6001 - DNA, 118 bp, Zea mays
ttcagcgtcacagatcttggcgccgaggtgttggccccgatgacgtagatggatcgagctggcagctcacgtggtctagttttgtgttagaccttggcgccgaggtctaggtctgtga

SEQ ID NO: 6002 - DNA, 75 bp, Zea mays
tctgctttgtctcgcgagctaaacgagccgagctagactaactctgtggctcattagctaaagggatttcccttt

SEQ ID NO: 6003 - DNA, 148 bp, Zea mays
actgcacttagggcctgtttggtttgatggctaacttgccacactttgcctaacttttgtgcctaaggttagttcttcaattcgaacgactaaccttaggcaaagtgtggcacatttagccacgaaccaaacagccccttagtgcatg

SEQ ID NO: 6004 - DNA, 158 bp, Zea mays
ctgtgcatgcactaaggggctgtttggttcgtggctaaatgtgccacactttgcctaaggttagtcgttcgaattgaagaactaaccttaggcacaaaagttaggcaaagtgtggcaagttagccatcaaaccaaacaggccctaagtgcagtttata

SEQ ID NO: 6005 - DNA, 189 bp, Zea mays
ttgcgtctcaactgctgacgggagggaagggagcggatctagtgatccatggtaacgtagttctcaacagtaccatgtagcaagcatcctggcatgctcctcttggtctcctggtctgatagactgacaattgtggggtaaggggggtcggggtggtctcctggtctcttcggtcatcgtctgagaggg

SEQ ID NO: 6006 - DNA, 149 bp, Zea mays
gtctaaggccagggtctgtttggttcgtgactaactatgtcacactttgcgtaaggttagtcgttcgaatttacgaactaaccttagacacaaaagttagataaaatatagcaagttagacagcgaatcaaacatatctactacctgca

SEQ ID NO: 6007 - DNA, 74 bp, Zea mays
gtcatccgttgcaacgcacgggcatatacttagttattctactaggtgagtgcccgtgcgatgcgatgggagta

SEQ ID NO: 6008 - DNA, 229 bp, Zea mays
ccgccccattgcccacacgacgacagttctcagctcgtctaacgcttagccgctgaagccattggagaggcgatatgggaagcccccggtgacgatgcggctaccgcagcacacggagcgtgcgggttcgccgaaaacctgcagcatcttccaagcgtggctgccccgtcaccttcgctgtcccggtcctgtctcgcagctgctggtcctgtgcgctgtccctggatgc

SEQ ID NO: 6009 - DNA, 148 bp, Zea mays
agaagagtgcgggcctgtttggtttgtgcctaaatatgtcacactttgcctaaggttagtcgttcgaattgaataactaaccttaggcagaaagtttaagcaaattgtgacaactgaggtagtgaaccaaacatgcctgtagtctctc

SEQ ID NO: 6010 - DNA, 163 bp, Zea mays
gcatgcgcaccagcagcgggtccatcagaccgcaggttcattagaaaatgtataagaggagttttttttttgtgcaaaagcggtgaccgtggaacctttaaatcatgtaaactagtgatttataataatactaggtgagtgcccgtgcgttgcagcgggaaca

SEQ ID NO: 6011 - DNA, 221 bp, Zea mays
acggtagaatggacggctgagatcgcagaatggcagaacaccaaaaaaggcagggctactatagctaaacttaataagtagtaggagatatataatttttcagacaaatacccaatgcacataatcttgtttcagggtgtctcaaatgagaacaaaaaactgaaaagggatttggtgaaggactgttttgtacttttgtttctcaacttccaaagagcttt

SEQ ID NO: 6012 - DNA, 113 bp, Zea mays
actaggctgttaggaggggacgggggaggtcaaacccaacgtacatcatgagtggagctgctgtaatgtaacagaagtattgcaccccccccccccccccccaataatatata

SEQ ID NO: 6013 - DNA, 103 bp, Zea mays
tgttttcaaacaaagatccctcggtgctccgctgtactcaggaatttagtagagaattacgactgatcattcatagagcgcggggggaatttgacacctcaat

SEQ ID NO: 6014 - DNA, 160 bp, Zea mays
agccgcgaaagatgtagggcatgtttggttccctgcctaacttgtcacactttgtctaacttttctgcctaaggttagttcttcaatttaaacgactaaccttagtcaaagtgtggcgtagttagccacgaaccaaacaggcccataaccttccgcactc

SEQ ID NO: 6015 - DNA, 149 bp, Zea mays
cggaaggttatgggcctgtttggttcgtggctaactacgccacactttgactaaggttagtcgtttaaattgaagaactaaccttaggcagaaaagttagacaaagtgtgacaagttaggcagggaaccaaacatgccctacatctttc

SEQ ID NO: 6016 - DNA, 198 bp, Zea mays
tcggagccgcgggtggggagcccgggcccggcctcgagcgcctcgagctccgggtcgaccatgggggagaggaagccgatgaggaggttgagcaggtagatgcccagcccgtaggtgacgacgtagaagccgcgcacgtagtagacccgaagcgcgtacaccgccgcggccacgagcgtgcccgcccaccgccccgcc

SEQ ID NO: 6017 - DNA, 118 bp, Zea mays
aattcatcttaagggctgatttggtgactagaaattatagaggatttatgggggaggaatctcttgctatttaatttttctccaattccttagcaccaaaccagccctaacctaacag

SEQ ID NO: 6018 - DNA, 126 bp, Zea mays
cttgggaagccccccaaggcaggcatgggccaaccgggctctgataccagatgtcagtgtccaacccccggcacagcccacactcgatagcttcggtcgttcatgcctgccttgggacactcgcat

SEQ ID NO: 6019 - DNA, 85 bp, Zea mays
agatctaggccgagtctcaaattccgacccgtcgggccctcaacatggcccgcatagatgagtcgggtttgagacaatacaaccc

SEQ ID NO: 6020 - DNA, 73 bp, Zea mays
cgtcgtccgcgtggtccggcggcaggaaccgcgcccaggcggcgtcggagtccgcagcgggcctgaagggcgc

SEQ ID NO: 6021 - DNA, 155 bp, Zea mays
gcaagagaatctagggcacgtttggttcgttaccccaattatcacactttacctaacttttcagtataaggttaattattcaattcgaacgactaaccttaagcaaagtggggcacagttagccacaaaccaaacaagccctagtctctctaatt

SEQ ID NO: 6022 - DNA, 223 bp, Zea mays
cgccttgcatcttgggccagattggagtttccagcatttgtttaagaaactgttagagtatacactataatttacctctaaaaatttttagcctatccctaataatattttttggggatatttttagcttcctcttggagttgctcccaagtgactccaacgtgccgtctatataaagcaccctactctctatcgccacttcactcgggtccatagttcaaaa

SEQ ID NO: 6023 - DNA, 84 bp, Zea mays
gggcgcacagaccaacgacctccgggccgaactcaaccgcaggcgcgcgggagaggacgcccggatctctttggaaagggcgcg

SEQ ID NO: 6024 - DNA, 248 bp, Zea mays
gaacgcttagggggtgtttgggatagctacaggttctagctccagtgtggagctatagtttataatatcaatttaaatagtttaaaaacagttttaatctaaataatatataaaatgacttatctaaatgtgttttaaaggctcacagctccagctccacgattttctggagcacctaatgacttggtccacgaacaccaccaaattttctggagatggagctatcccaaacagagccttaggagcag

SEQ ID NO: 6025 - DNA, 82 bp, Zea mays
cgccgccgcctccatgaaccggtgaccggagctggacggtgttgactctggcagagcggttgaggtcgtgggggggggggga

SEQ ID NO: 6026 - DNA, 69 bp, Zea mays
gtgcagttgtgtcactgcacgtgggacccagtcctgctcagtcccgcgtgtcagtgacccatccacaaa

SEQ ID NO: 6027 - DNA, 200 bp, Zea mays
ggcccttcgaacttgggtgccgtttggtcacaaaatgtaacgtaaatgataacgataatggttcgagtttgtataggccggtattaatttctagtatattatttgattacggtgcacttaaacaaacatattttaacgttatctgttacccattatattaaaaatatgtgaaccaaacagcacgctaagtttggttctat

SEQ ID NO: 6028 - DNA, 96 bp, Zea mays
aactcattaccggaatcgcgttctttgccgagtgtctaagacactcggcaaaggctattttacactcggcaaagagctaaattccgatagtgacta

SEQ ID NO: 6029 - DNA, 179 bp, Zea mays
aactagctctaagggctgatttggtgaccagaaatcacggtcaccagagagttggaggggattgaggggtgatctcattatcaccaaatcatctctagagagaattggagaggattgaggagaaatctcttcaatcttctcgtgatctccttgtcaccaaatcatctctaaggtagatc

SEQ ID NO: 6030 - DNA, 128 bp, Zea mays
gccgtgcggaggcgggtctgtcggcgtagagctcgcaccccttggaaccgaggccgcgcgaccccccgcaaccgaagatccaaggcagcttccccctgttcgtcgccggagagtcgccatcggcaaaa

SEQ ID NO: 6031 - DNA, 91 bp, Zea mays
tcgttcgagtgagtcgggcttccgaattcggattcgcgcgagcgatgaattttaaataatcaccggacgcaccgattttcagaataaatat

SEQ ID NO: 6032 - DNA, 134 bp, Zea mays
ctcaggccttgttcgtttccgtcggattgcacccggaatcgttccagctaatcaaagtttatataaattagagaagcaatccggctaggaatcattccaacctatcaatccggtagaaacgaacaaggcctcaa

SEQ ID NO: 6033 - DNA, 84 bp, Zea mays
atcatggctcccgacgaagcaggggctgcgaccagcgcactggacgttgctgggaccgcctgatgctggcgtcggctgttgcct

SEQ ID NO: 6034 - DNA, 190 bp, Zea mays
atcgaaatatagggctctacacaggaaaaaccactccaacagtgcctcaattcaacaaattttgtcaaaaaactatagggcaccctctcaagtgcctcaaatatactacaccgtagtgggctgccctataatctagatttggggctttactgttggagcggggtgttttgttggtgccctaaattctata

SEQ ID NO: 6035 - DNA, 91 bp, Zea mays
agccttggacgcctgctgcaccagagatcataccgtgctggttcggggacacatggccgaagaactgctgctgctgctggtgggcttggtg

SEQ ID NO: 6036 - DNA, 95 bp, Zea mays
cgacggctttaagccgtcggagataaggcttgaccgtcggaaataatctatttccgacggtttattccttatgtccgacggctttggccgtcgga

SEQ ID NO: 6037 - DNA, 119 bp, Zea mays
gtttgcagcccctcacaaaaaggaggataaatctaacctgcaggctaataacacaactaaaatgttatctggtggatctatagataggatctatctttatttttgtgagaggctgcaaa

SEQ ID NO: 6038 - DNA, 148 bp, Zea mays
ctgcaaaccagactgtttgcagcctctcacaaaaataaagatagatcctatctatagatccaccagataacattttagttgtgttattagcctgcaggttagatttatcctcctttttgtgaggggctgcaaacagcctgctttgcag

SEQ ID NO: 6039 - DNA, 152 bp, Zea mays
gcctgcaaagcaggctgtttgcagcccctcacaaaaaggaggataaatctaacctgcaggctaataacacaactaaaatgttatctggtggatctatagataggatctatctttatttttgtgagaggctgcaaacagtctggtttgcagcg

SEQ ID NO: 6040 - DNA, 131 bp, Zea mays
  unsure (123)..(124)..(125)..(126)..(127)..(128)..(129)..(130)..(131): n = A, C, G or T
ttaggccttgttcgtttgcgtcggattgcacccggaatcattccggctaatcaaagtttatataaattagagaagcaatccggccgagaattatccgacccaccaatccgacacaaacgaacnnnnnnnnn

SEQ ID NO: 6041 - DNA, 134 bp, Zea mays
ttaaggccttgttcgtttccgtcggattggtggatcggaacgattcctagccggatcgcttctctaatttatataaactttgatgagctggaacgattccgggtgcaatccgacgtaaacgaacaaggcctaag

SEQ ID NO: 6042 - DNA, 95 bp, Zea mays
gaaacaatccaaacttggaacggttctgggccacccttagggcccgttcggttgacggggaatagaaggccggaattgttccggtccggattgtt

SEQ ID NO: 6043 - DNA, 75 bp, Zea mays
atgtatgtaagggggtgtttggtttctatgaactaaaaattagtctatagaaaccaaacacctctaagtgagaac

SEQ ID NO: 6044 - DNA, 81 bp, Zea mays
ccaggaactgatgacagcctaggcgagaatacggtgtgatccccacgcctgtgctcgtgccacgtgctgcttgcttccgtg

SEQ ID NO: 6045 - DNA, 133 bp, Zea mays
atccccccgcagtcgcaacgggagcaccgcacacgatgagactggagtagaagtcgaaggtaggagctgacgggttgaaatcccccgcagtcgcaacgtcgtgagggtgcgaatgttgcggttggattagaga

SEQ ID NO: 6046 - DNA, 98 bp, Zea mays
  unsure (89): n = A, C, G or T
tataccagctgctggtccatgtaaatagaataaaaacaaattactaaagagttattttgtaaattttgatctgtgtttgtgggcctccnagtgatgga

SEQ ID NO: 6047 - DNA, 77 bp, Zea mays
cgccgctatgatctacgtagccgagggccggccactctatcccccaacgcccttgacaacctggtatcatgatccaa

SEQ ID NO: 6048 - DNA, 106 bp, Zea mays
ttgattagctggaacgattccgggtgcaatccggcaccaacgaacaagccctaaggctctgtttggttgtccgggattctatccaagaatcgttccagctgatcaa

SEQ ID NO: 6049 - DNA, 86 bp, Zea mays
tccgctctctggttacgatgtcctatgcgccaccctccggttggaccgttgcacagtggacggttgacgtcgggccgttagtgatg

SEQ ID NO: 6050 - DNA, 103 bp, Zea mays
tgttttcaaacaaagatccctcggtgctttgatgtacgcaggaattcagcagagaaatgcgactgatcattcacagagcacgagggaaatttgacacctctat

SEQ ID NO: 6051 - DNA, 80 bp, Zea mays
cccaaaacctcccctccctccctccctcccacccagatcgcaggtcggagagcgcgtgggacgggaggggagcacgcgga

SEQ ID NO: 6052 - DNA, 126 bp, Zea mays
aatagaatgtgacggtgacggtgacggcgactggtgcccgcgctggattagaaatttcagtggtcgccaccgcacgcgtatttgattgcgagttttgtcgtcagccagtcatggtcatggccggtt

SEQ ID NO: 6053 - DNA, 142 bp, Zea mays
gagctcactgagggctgatttggtgaccggggatcccgaggggaagaaatcctcttgctattcaaaattgaattgcgaggggattcctcccccatggatcccctagggatccctagtcaccaaattagccctgaagtggatt

SEQ ID NO: 6054 - DNA, 232 bp, Zea mays
aataagtgaatgtccgtgcgttgcgacgggagtaaaaaaaatgtatgaaatatataaatggaacgacaaatatcgctataatatgtaaaatccatgtggtaaacattatcaatattacacaaattatttctaaagagtcaatttagaattttgtaataacacacaaatatgtcgacaatcatacactaatctaatcctttttaccacgacgtagcgacgacaagcacgacag

SEQ ID NO: 6055 - DNA, 248 bp, Zea mays
agcaccatctgggtcccgctctggctgattggtctcaaccaaagtttttctcgaacagcttgatgtattggatactgttgtattcgaaaactaaagcattgtaaactgtagtaatgtcatgactaaagtataatttagtatttaaaaaactgcagtttagaaaaactgtattcccaaacagggcctcatttgcttttagtggcagagctcttgtaaggctgtctccagcagcgtcccctaaatttcgt

SEQ ID NO: 6056 - DNA, 216 bp, Zea mays
gcaatcagaccttatgtgcaagcgttcaagcgaggttcatggtccgttagatcatgatccaactgtagacataatcatggtttgttaggggtttttctataaatctacacaagctgatggtggaagagtttaagtgttaaatgtgatatatggttggatcataatctaacggacaatgtatctcgcttgcacgcttgcacataagacatgattgca

SEQ ID NO: 6057 - DNA, 171 bp, Zea mays
tttagttgcaataacaggacgggatgagacgatccctcaaataagattattgaattagagtcaaggattgatacaagactattccagtgttgtccccaattatccctcaaaattggtgcaacgaaatacagatactagagacatccctgtcctggttgtcccgcaaccaaa

SEQ ID NO: 6058 - DNA, 157 bp, Zea mays
ggatatcatagttagggcatgtttggtttgtggctaaatgtgccacactttgcctaaggttagccgttcgaattgaataactaaccttagacagaaaagttaggcaaaatgtggcaactgaggtagtgaaccaaacaggccctttcgaattgaataa

SEQ ID NO: 6059 - DNA, 212 bp, Zea mays
atccgaagcggatcacggaccacgtcgcaagaaagcggtcgattctcgtagcctttaccacgtaccccttcgcattcgcattgtcaatcgcacgcctcgccccgcgaccgctagggtttcccctatatctccccgagcgcactaccaaagtcccaaaacatcttctatacgtgccgagtcaggtgactggtccagtgctcaccgaacctgtt

SEQ ID NO: 6060 - DNA, 164 bp, Zea mays
gagccaggtccagcgcaccacgtacaggtctgcgtaggggtccttcttctcgtcccccgcgggctgcttcgacgtcagcttgaacgagatgtcccgcctgaacaccaccttcaccagcacctggcacaccgcggccaggtacgcggagcagctggccgtcatcc

SEQ ID NO: 6061 - DNA, 152 bp, Zea mays
ttcgtttgtgtcggattgatgggtcggaacgaatccgagctggattgcttctctaatttatataaactttgattagccggaatgattccgggttaattagagaagcaatccggtccggaatcgttccgacccaccaatccagcagaaacgaa

SEQ ID NO: 6062 - DNA, 104 bp, Zea mays
cggaacgaatccgagctggattgcttctctaatttatataaactttgattagccggaatgattccgggttaattagagaagcaatccggtccggaatcgttccg

SEQ ID NO: 6063 - DNA, 88 bp, Zea mays
ccttgttggagcagcggctgctggctccggctgccctcaggccgcgcgcggcgcagcagccggggccgggcgccgttgacgatacacc

SEQ ID NO: 6064 - DNA, 184 bp, Zea mays
gtgattaaggatgtttggtttctatggactaatgtttagttcctatattttattttagtatctaaatagttaaatatggaaactaaaattatttagtttccgtatttaacaatttaaggactaaaatagaataaaataaaggagttaaagattagtccctagaaaccaaatactccttaaatca

SEQ ID NO: 6065 - DNA, 70 bp, Zea mays
gccaaagctattctgaaaaatcatttggcaaaacggcttataggttgtttttcagaaagacccttgtata

SEQ ID NO: 6066 - DNA, 79 bp, Zea mays
tagaaccgaagaaccgaaccgaagaaccgagaaccgaactagtcggttctagtttctttgttttgctatttcggttcta

SEQ ID NO: 6067 - DNA, 88 bp, Zea mays
aatgatactatcggacggttggactgggcaaaaagaatcggaaccgaggaaccgaaaccgaactaaccgaaccgaggaaccgttatga

SEQ ID NO: 6068 - DNA, 149 bp, Zea mays
tatattccttcaggccttgttcgtttgtaccggattggtgggtcgaaacgattactaaccggattgcttctttaatttatataaactttgattaggtagaacgattccggatgcaatccaacacaaaagaacaaggtctcagtgttgtt

SEQ ID NO: 6069 - DNA, 117 bp, Zea mays
ctcatgatccgtagcagtgcttgcgtgctagtccattgagttatacatggaaggattctgtcctctcttttgtttgtagatattgtggtggtattaagtatttgttgtgcttatatt

SEQ ID NO: 6070 - DNA, 116 bp, Zea mays
tggcggaaatagacgaccgacggcggcgtctttgcacggatcgaccgggtcgccgctccgcgaagctgcccagtggatccgcgtggacgacggcgtctgctggtcgccgcccggag

SEQ ID NO: 6071 - DNA, 146 bp, Zea mays
ttttttcaagaatttagggtgcgtttggttgtaataacagaacgagatgggataggactatcccttaaataaggttgtttgagtgatcgtcacgtctcatcctgtcctgtcattgcaaccaaacgcaccctaagttaaattattcg

SEQ ID NO: 6072 - DNA, 116 bp, Zea mays
tcatagtatatgacgctgacgtaacacgactcggcatcatagactatgacgccgagatacgtgctacgcaacacgtatggcgccgagctgtgttacctcggcgccatagactatga

SEQ ID NO: 6073 - DNA, 126 bp, Zea mays
tctatgccgtgccagaaattgtgtgctttgggccggcgtattaggcacagcacaaatgtacacctatataatccgtatgaaacggagttccgagcacgaggcacactgttctgtgcttgctaaaat

SEQ ID NO: 6074 - DNA, 91 bp, Zea mays
gcgaagtcacgcatcgttcacgtgggcgagaggttgtgcgctgtccagacaccggttaccaccagccacgcgccacgatgccaggccacag

SEQ ID NO: 6075 - DNA, 108 bp, Zea mays
gggaacaattagggctgatttggtgacccgggaggattggaggggattgaggaggaaattagtttatttgaaccgcatgcggttccaaaatcaaaatcaacgacatgt

SEQ ID NO: 6076 - DNA, 176 bp, Zea mays
ctagtctggaagccacaaaactggagatgattgatgattgtaggggctaaaatctctgtcttattaaaaaattggataagaaagagattttagcacctccagtcccctccggttttgtggctatcaaactagcctataacgtgtgtcccctccggttttgtggctatcaaactagc

SEQ ID NO: 6077 - DNA, 194 bp, Zea mays
gccgagcgccgccttcaccgagtgtttggcactcggcaaagatacctttgtcgagtgtaattctttgccgagagtcctgctctcggtaaaagttttcgttaccgagagctatactttgccgagtgcggcactcgacaaaagtttctttgccgagtgcccgataaaaagcactcggcaaagcgccgagcactcgg

SEQ ID NO: 6078 - DNA, 147 bp, Zea mays
agatatttttcacgggtacgggtttgggacggtaaaacccagcgggtttgtaaccgttgccatctctagtcctgtccactcgcgccgggctggacgaagacccggtggcctgctggccttcccagccacgtacgcgtctcatcctca

SEQ ID NO: 6079 - DNA, 239 bp, Zea mays
gatttgaggtgagagaggagagcggaggagagacttatagcggtggtggaggagaggaagggggggttaaaaagggtggcaatggcgagagcgggtggtggagcggcaacaaggaataaaactcggcgcagtcaccagtcagggacgagcgctttgactgtccggtgtccgcgcaggcagccgccccgcccctcgtctttacaagactgccttttgtttttgtttccgccgtgacgtga

SEQ ID NO: 6080 - DNA, 145 bp, Zea mays
tcatggcggcgctcacaaggtgccacggcccgctgcagctgtctatccccaaggaaggcggcaacgagggggagcctcggcaaggggtttgggttccccctccccttcgatcggtcgagagcaaccaagtgaagcgccatcaccg

SEQ ID NO: 6081 - DNA, 164 bp, Zea mays
gagccaggtccagcgcaccacgtacaggtcggcgtaggggtccttcttctcgtcccccgcgggctgcttcgacgtcagcttgaacgagatgtcccgccggaacaccaccttcaccagcacctggcacacggcggccaggtacgcggagcagctggccgtcatcc

SEQ ID NO: 6082 - DNA, 89 bp, Zea mays
ccttggtggagcagcggctgctggctcccaccgccctcaggccgcgcgcggcgccgccaccgggaccgggcgccgttgtcgatacaccg

SEQ ID NO: 6083 - DNA, 202 bp, Zea mays
gtggattggtaggcaggcaggcaggcagacacgatggcttggggaagggggtgtacaaggcaacggattccgatggttaacgactacagtctagaaaattaaaaatattcccgttccgttaggtttattaataaccgtattatcattgctcgatagtgataggtcaaacttcgccccgccagctcaggctgcagaccggttc

SEQ ID NO: 6084 - DNA, 102 bp, Zea mays
taacgtcacacccggtctaaggtgcggcgaccgattcggccgccacaactgcggccaacggccgattcggccaccacaactgcggcgcgggaagtgtggcgt

SEQ ID NO: 6085 - DNA, 212 bp, Zea mays
gttgctcttagggggtgtttggtttctagagactaatttttagtcccttaattttagtttctaaattgacaaacataaagacttcaaagtgtttgatttatagagactaatttttattccctccattttagtttctaaattgacaaacataaagactaaaatgaatggactaaaaattagtctctaaaaaccaaacatccccttattctata

SEQ ID NO: 6086 - DNA, 97 bp, Zea mays
gcggcgggggcgggcggttcgcgcggcgggattcgccgcgggcgttgccggttgtgggaggggatttgcgtcgtgcgggctgctcgagcgggggcaa

SEQ ID NO: 6087 - DNA, 149 bp, Zea mays
ccgtctctctcaggccttgttcgtttgggtcgaattgcacccggaatcgttccaggtaatcaaagtttatataaattagagaagcaatctggctagtaatcgttccgacccatcaatctggcacaaacgaacaaggcctcaatgagatc

SEQ ID NO: 6088 - DNA, 125 bp, Zea mays
gacacatgtcctggcacgtgacccgaaccggcacggcccgaggcaacagcgtgccgggccaggcacgaccctgttcgtgccgtgcctaaccgggctcgggccgggtccgtgccgggcggcccgga

SEQ ID NO: 6089 - DNA, 99 bp, Zea mays
gacccggctcgacttttctggcaagtcgggcgacttgtcaacgactggaaattctcagtcgactagtcgtcgacttggtctggcaagtcgaccgacttg

SEQ ID NO: 6090 - DNA, 134 bp, Zea mays
ttagtcctttgttcgtttccgtcggattataactggaatcgttccagctaatcaaagtttatataaattagagaaacaatccggtcaggaatcgttccgacctaccaatccggcagaaacgaacaaggccttag

SEQ ID NO: 6091 - DNA, 74 bp, Zea mays
gaaatttcaggtccgccgccacgcgtcacgagacggatggtgccgaggccgtggaatgcggacgggcgcccaaa

SEQ ID NO: 6092 - DNA, 103 bp, Zea mays
catcgtcgtaggcttctagcaggtcttcaagtccttcatctgaaagggatgaaggaggaccaatgatgtcctgagggctagtttgggagccacaaaaccggag

SEQ ID NO: 6093 - DNA, 198 bp, Zea mays
ctaatttttagggggtgtttggtttctaagaactaatgtttagtctcttcattttattctttttagtctataaattgctaaatatagaaactaaaataaagttttattttctatatctgggaattttggaactaaaatgaaataaaatatagggactaaacattagtccctagaaaccaaacacccccttagtctctc

SEQ ID NO: 6094 - DNA, 165 bp, Zea mays
tgagctagtccatcatcttctcactcctcacttttttgtttggtttgtggaacggaatgagtcaatccatcatcacctcattacttatagttagttagtactaatatgaggaatggggtcatcccaccaaatttgaggaatggacccatgatgtaccaacatatt

SEQ ID NO: 6095 - DNA, 138 bp, Zea mays
gctttagggcatgtttggtttgtggctaactgtgccacactttgtctaaagttagtcgtttgaattgaataactaaccttagtcagaaaagttatgcaaagtggggcaagttaggcatcaatcaaacagacccggtgg

SEQ ID NO: 6096 - DNA, 148 bp, Zea mays
ggcctgcgcctgcgggatctctgtcgcgtcgtccgccgccagaggctttcggccgccgcctccttcaacgatccgccgtccgccagaggcggatctccctccttcaacggccgccgccaggggcagagatccgcgccaggagctgcgc

SEQ ID NO: 6097 - DNA, 115 bp, Zea mays
gcgttattagcctcaagtcaagaatgtgttcactaggaaccatacccttcaagtatttccaactgctggctggtgaccctgtgtagcaacttcttaagttgtgggccatcctgct

SEQ ID NO: 6098 - DNA, 125 bp, Zea mays
agcacacgataagggctgatttggtgatcagagattataaaggggagaaatcctcttgcaaatcaattttgaataacaaggggattcatttcttatggatcaccaaatcagctctaataggatga

SEQ ID NO: 6099 - DNA, 77 bp, Zea mays
ttgcataggtggtggtcatggttgaataatgagcatgaactcaacaccttcagccttgaccaacctctccttattct

SEQ ID NO: 6100 - DNA, 103 bp, Zea mays
tgctggtcaaattaacttcctagaggcttattaagccgtaggaagttagccagctaacttcctaggggctacagtcagccgtaggaagttagtcagctgacga

SEQ ID NO: 6101 - DNA, 199 bp, Zea mays
aaaagagttagggggtgtttggtttctatggactaatgtttaatccctttattttattccattttagtttataaattgtcaaatataaaaactaaaatagagttttagtttctgtatttagtaattttggaattaaaatggaataaaatatagagactaaaaattagtcctagaaaccaaacaacctcttagtcgtttt

SEQ ID NO: 6102 - DNA, 153 bp, Zea mays
tagacttgctcgacagggacttggtcgttcactctgcctctcggacttgctcggtagggacttggtcgtccgctttgcctcgcagacttgttcgacagggatttgctccgtctcgtagatttgctcgacagggacttggtcgttcgctccacc

SEQ ID NO: 6103 - DNA, 123 bp, Zea mays
ttatttataggtgactgcctgtgcgttgcaacaggaacatatataggtagattaggataacaaaatttaagataacaatatatatgttcttgttgcaacgcacgggcactcacctagtatatt

SEQ ID NO: 6104 - DNA, 168 bp, Zea mays
aagatgagggggtgtttggtttttagggactaatttttagttcctctatcttattctattttagttcatataaattgttaaatacggaaagttttcgtattggcaatttagggactaaaataaagtggctaaaaattagtccctagaaaccaaacactttctagtaat

SEQ ID NO: 6105 - DNA, 177 bp, Zea mays
aattgacaaggtgagtgtccctgcgtcacaggtccaagtttctcttcgatatcatcccggacagctcgcatatatgtcatcccctatctcataactatataacacatatgtgcatatataagttatcgagatagtatatgtcctcgttgcaacgcacgggcactgacctagtataca

SEQ ID NO: 6106 - DNA, 80 bp, Zea mays
tcgttgtgtcccgcccgccttgggttatgtcctgcgccaccctccggctgggccattgcagagtgggcggtgacggcccg

SEQ ID NO: 6107 - DNA, 252 bp, Zea mays
atttagcgagaaccactgcgggagataaaaaaagtatggaataaactgttaatgatgtgacgcaaaaaaagtgatatagagagagaaatttagagggaaccgcttctgatagtctgattccctcgtttagaagtggtgtacattgaattctcgccttacttcactttgaggctatccgcaaccgttacccctaaatttttctccctatatcacttttccccctattttttcatctcccgcagcggttccccc

SEQ ID NO: 6108 - DNA, 116 bp, Zea mays
gttttttagactcagttagcatacagagtagacggtgggttaaacacaaaagacgttttagttgaagttgtacacaattcaacatgagtcatgttggctagaggatggaaggttag

SEQ ID NO: 6109 - DNA, 194 bp, Zea mays
gacagattgagtgttggcggctagctcccatatgtttagagtctagggaaggaataaataatcgagacaagtcttatccctgtatttttgtagagaggtatttgaaacaagaagttcatcaaatacaagggaaaaatgtcatggcgacaaatatgttagaaatctatggagttctatgtttaatttaatctgaa

SEQ ID NO: 6110 - DNA, 80 bp, Zea mays
ccgggcccctaagggctgatttggtgaccctccaatcctcccgtgatccccttgtcaccaaatcaatcctaatagttagc

SEQ ID NO: 6111 - DNA, 173 bp, Zea mays
cccaagcactgttagatccggcacggattgagaccatgccggttcagcccggattagatagcagaccgtgttgtaccagcccacgggcctcgagtgaggcttagacacgaccggctagattaataatcgtgtcgggtcggtccacgaccgtgatggacctaacggacccataa

SEQ ID NO: 6112 - DNA, 137 bp, Zea mays
gacgctaaaggcctgtttggtttgatgtctaacttgtcacactttgtctaacttttcggttagttctttaattcgaacgagtaatcttaggcaaagtgtgatacatttagccacgaaccaaacaacccgtggcatct

SEQ ID NO: 6113 - DNA, 84 bp, Zea mays
gggcacaaagaccaacgacctccgggcagagctcaaccgcaggcgtgcgggagaggacgcccgggtatccttggaaagggcgcg

SEQ ID NO: 6114 - DNA, 141 bp, Zea mays
  unsure (133)..(134)..(135)..(136)..(137)..(138)..(139)..(140)..(141): n = A, C, G or T
actaagggcatgtttggttccttgtctaacttgccacactttgcctaacttttctgcctaaggttagttcttcaatttgaacgactaaccttaggcaaagtttgtcgtagttagccacgaaccaaacgacggnnnnnnnnn

SEQ ID NO: 6115 - DNA, 224 bp, Zea mays
  unsure (44)..(45)..(46)..(47)..(48)..(49)..(50)..(51)..(52)..(53): n = A, C, G or T
tccactaagggggtgtttggtttctagggactaatgtttagtcnnnnnnnnnnctacggactgatgtttattcccttcattttattacattttagttccaaaattactaaatatagaaactaaaactttattttagtttctatatttagcaatttatagactaaaaaggaataaaatgaagggactaaacattagtccctagaaaccaaacccccactaaactg

SEQ ID NO: 6116 - DNA, 134 bp, Zea mays
gtaaggccctgttcgtttccgtcggatggcacccggaattgtttcagctaatcaaagtttatataaattagagaaacaatccggtcaggaatcgttccgacccaccaatccggcagaaacgaacaaggcctaag

SEQ ID NO: 6117 - DNA, 111 bp, Zea mays
tctaggactacttttaggccttgttcagttacgttgaatatgaagggattaaatccccaccaatccagtccgatctctacgcaaccgaacaggcccttaggtgttagtctt

SEQ ID NO: 6118 - DNA, 159 bp, Zea mays
agatataaaaactaagggtctgtttggttcgtggctaactgtgccacactttgcctaaggttagtcgttcaaattgaagaactaaccttagtcagaaaagttaggcaaagtatggcaagttagccagagaaccaaacaggccctaagtgctaaaatgaa

SEQ ID NO: 6119 - DNA, 112 bp, Zea mays
cacccgttggcagagacaggcgtgtgggtccgcctcggcctatcccagtcccaccatagtgaggctgagctggtggacacggtgctccatgtcgcgctgctccgggtccacc

SEQ ID NO: 6120 - DNA, 149 bp, Zea mays
cgaagcggggagggcctgttcggttgtttgggattggagccccgaattaattcctagccgaattacttatctaatttatatagattttaataagctggaatgaatcctggcttattccggtacaaccgaacgggcccttagtaaattac

SEQ ID NO: 6121 - DNA, 120 bp, Zea mays
cccgttgggtacccgaaacccgcatgggtatgggtttgggcaaaattttatacccgtcacgggtatgggttttttagcggacgtattttttcttcgcgggtacgggtttgggcaagtaat

SEQ ID NO: 6122 - DNA, 191 bp, Zea mays
agttataggggtgtttggtttatagggactaaactttagtccctccactttattccattttagttcataaattgttaaatagggaaattaaaatagagttttagtttctatatttagtaatttagggactaaaatagaataaaatgggggactaaaaattagtccctagaaaccaaacacaccctatattt

SEQ ID NO: 6123 - DNA, 131 bp, Zea mays
agtataagataagggctgatttggtgatcaaggatcacggaagattgttagggattgaggaggaaattagtttatttccctatcaatcctcccgtgatcctttgtcactaaaatcaaccctaagagctaga

SEQ ID NO: 6124 - DNA, 86 bp, Zea mays
tttgtgttctgtggcatcgcacgggcacctacctagtatatattataagactagttagtggcccgtgcgttgctacagtttttaca

SEQ ID NO: 6125 - DNA, 108 bp, Zea mays
gcccactgaagctcctattagtgtgctgttaccttacagatggactgtgagaaaccacctgagcccaacacgagaggaagcggcacactgcgtagcgctctcatatag

SEQ ID NO: 6126 - DNA, 101 bp, Zea mays
cgaggacggggcgcggtgcgcggcgtggacggggacagctgcccgatccgtgaaaggcgtggggcaccgtgcccgcccgcccgcccgcgtgccgtattgtg

SEQ ID NO: 6127 - DNA, 145 bp, Zea mays
acattgtaagagcatgtttggatcggtgcctaacttgccacactttgcctaacttttctgcctaaggttagttcttcaattcgagcgactaaccttaggcaaagtgtggcacaattagccacgaaccaaacatgtcttaaaacta

SEQ ID NO: 6128 - DNA, 113 bp, Zea mays
ccgacggtccccgctaagccgtcggacataaggctctattatgtccgacgaccctcgctgggtcgtcggacataatagagtcttatgtccaacagcttagcgggggttgtcag

SEQ ID NO: 6129 - DNA, 111 bp, Zea mays
atagacaaaaagaggccagaggcccaatcctacatattgtgtatcgtgtgttctttgagtgtgtgaattgctgggaaagggaatgggcttctacgacttctcgctcctcta

SEQ ID NO: 6130 - DNA, 71 bp, Zea mays
acggctatagtgctgtgtctggaccaccatctcgatccgtagtgctggcacggacacaatacagttatatt

SEQ ID NO: 6131 - DNA, 144 bp, Zea mays
cagactattggcatgtttggtttgttgcctaacttgccacactttacctaacatttctgcctaaggttagttcttcaattcggacggctaaccttagtcaaagtgtggcatagttagccacgaaccaaacgtgccctatgtcca

SEQ ID NO: 6132 - DNA, 132 bp, Zea mays
cgtccaggtcgcgacacgactcccggggcaggcgtggacgaagccagctcctctctcgcaggcacgacggccgtcctcaggcgcggacgccggcgcgtcgccgtgggaggccgtgtcgcagaggcccaggtc

SEQ ID NO: 6133 - DNA, 159 bp, Zea mays
actaggaacgtgctcgtacgatgccacggaacacaaattgcgacctttcacggtacagagatttgtttgtttaggttaaaaaaaatatttaatcccttcaaaaaaaatactccaccgactgtacttcatttttccttgcatcgatggtacatagatttc

SEQ ID NO: 6134 - DNA, 240 bp, Zea mays
agaggattaagggggtgtttgagatggctccaggttttagcttcagtgtggagttgtagtttataatatcaatttaattagtttttaaaatattttaatctaaataataaacaaattacttatctaaatgtcttttaaaggcttacaactctaactctgacgattttctagagcatctaatgacctgcttcaccaaatttcttggagctggagctatcccaaacagggtctaaatctcct

SEQ ID NO: 6135 - DNA, 82 bp, Zea mays
ctttagtcgtgtttttgctcagctatgcccttccagtgctatagaacagaagggcacagctgagcaaaaaacacgactaagg

SEQ ID NO: 6136 - DNA, 129 bp, Zea mays
ctctcacctacgggtcttcggctgcctcgcgttcaccaaggagcttggccacatcggcaggctcgacgacaggagcaccccaggggtgttctttggctacgcggagggctcgaaggcctaccgcatcct

SEQ ID NO: 6137 - DNA, 188 bp, Zea mays
agacagctaaggccctgttcgtttgttacggattgatggatcggaacgattcctaatcggattgctttagtttatataaacctcagctggaacgattccggggattgcttctctagtttatataaatctcaacgggaacgattctggatgtaattctacacaaacgaacaaggcccaaagaagaaata

SEQ ID NO: 6138 - DNA, 219 bp, Zea mays
gcaccttgaagaggacggaggtgccgtcggtgtcgtgcgcgaacacgatgctggtcttgaacggccggtcggtgcgcgggatgatgggctcccgcgccagcatgacgaagcgggtgacgttgccggcgtcgtcctggatgccggcggcgaggacctggaggccgtagagctcggcggcgcgcgcggacgcgatggcggcggtgtcccggaggccccccg

SEQ ID NO: 6139 - DNA, 126 bp, Zea mays
gggctgtttagttcgtggctaaatgtgtcacactttgcctaaggttagtcgttcgaattgaagaactaaccttagacagaaaagttaggcaaagtgtggcaagttaggcatcaaaccaaacatgcc

SEQ ID NO: 6140 - DNA, 102 bp, Zea mays
tgtgccccatccgctctcgggttacgatatcctgttcaccaccctccggttgggccgttgcagagtggacggttgacgccggcccgttagtgatggggtgcc

SEQ ID NO: 6141 - DNA, 150 bp, Zea mays
gaaaggtgaagggcatgtttggttcgctgcctaacttgccacaatttgcctaacttatgtgcctaaggttagttcttcaattcgaacgactaaccttaggcaaagtgtggcatagttagccacaaaccaaacaggcccgaaaactttcgg

SEQ ID NO: 6142 - DNA, 87 bp, Zea mays
tcaggtgctggccgggcaccgggcaagcacgaagggacggacgaccggtatgatgatgcggtgcccgccgcccggcactaaccgcgc

SEQ ID NO: 6143 - DNA, 123 bp, Zea mays
aattgtttttagactcagctagtgcttatggcaaaccaaacccctcagccaaacagctgcatggtctagaggtagaggagtagactcctcacatcgggtaagtctagctgagtattagtatac

SEQ ID NO: 6144 - DNA, 162 bp, Zea mays
ctttagagttccttgttggaggcgtaggggacctgaccgtcccctacatttagcgggacaggatcctttacaggactttgttggaggcagcctaaagcctcctgtactctaaatatagaaaaccaaatggtcctctacgctctccaacaacgtcctctaaac

SEQ ID NO: 6145 - DNA, 190 bp, Zea mays
  unsure (179)..(180)..(181)..(182)..(183)..(184)..(185)..(186)..(187)..(188): n = A, C, G or T
tttagggggtgtttggtttctagggactaatctttagtccctacattttattctattttagtacttaaaatgctaaatatggaaactaagactctattttagtttccgtatttgacaatataagaactaaaatggaataaaatgaagggactaaagattagtccctagaaaccaaacannnnnnnnnnag

SEQ ID NO: 6146 - DNA, 67 bp, Zea mays
gcgcgtgtcgctcccgcctccgacgcggaggacgacgacgacgacggaggcgagagggaggagtcgc

SEQ ID NO: 6147 - DNA, 151 bp, Zea mays
ccggtcacgctcggctcggctcggctctcttcccctctgcagcctgctgccgcggcatgctctcttatgcgtactgcctcaaggcaaggcatgcgttgttgtagtatgcagcatgaggagaaggggccgaacttggcatgagatggatatc

SEQ ID NO: 6148 - DNA, 212 bp, Zea mays
  unsure (80)..(81)..(82)..(83)..(84)..(85)..(86)..(87)..(88)..(89): n = A, C, G or T
ccgctgtagaggaacaacaggcaccgagatccgagccaccgttggttgtccctattccagtcacttcaacgtctaggcgnnnnnnnnnnaaactatcgtttatatggttgagagtgtaacactttaataggctaacttttagcggagtgttcgcccaacaaatctaaaatttgcagttgtgcgttcgggtgtgtgttgcgactcggcagcct

SEQ ID NO: 6149 - DNA, 144 bp, Zea mays
ggcaaaaaataggctatctccagcaggtttgtgtatatgggcgtgcaaagtactgttttgcactgtagaccgcaaagtttacaaagtggagttttaaatagacagtgggatagagaggctgctggagacagccttgttagattg

SEQ ID NO: 6150 - DNA, 158 bp, Zea mays
aaaaaaatgtaggctaatccaacagacttggtaaacctacagactgaatagagagtgaagcaaactatccaaaaatggagagcgaatattgagggatagagaaccactaaatttgaagagtcatttacagagtctattggatacacctttcttctaat

SEQ ID NO: 6151 - DNA, 148 bp, Zea mays
aaatttctctgagggctagtttgggagtccaaatatcggaggggttagaagggttaaaataccttattcaaaattgaataagaaagaattttagccactccaatctccttcagttttatggctcccaaactagcccttaattaataaa

SEQ ID NO: 6152 - DNA, 87 bp, Zea mays
ggcggctgcgcgagctccaggcgaggcggctgcgtgagctccaggcgaggcgaggcggctgcgcgtgctctgagctgcgacgacagg

SEQ ID NO: 6153 - DNA, 171 bp, Zea mays
tcgcgtgcgcggccagccaggccgagaagaaacgggaactcctggcgtgccgctggagccaggctggggagggggttttgcacgagcggatgcagcgtctggatgcagtgcaggcaaccaaacagccggacattggatctcatgggccaggctgggccaaaaccaggcaac

SEQ ID NO: 6154 - DNA, 104 bp, Zea mays
tggttcgtggctaactacgtcacactttgccttagtcgttcaaattgaagaaccaaccttagccagaaaagttaggcaaagtgtgacaagttagccagggatca

SEQ ID NO: 6155 - DNA, 97 bp, Zea mays
  unsure (1)..(2)..(3)..(4)..(5)..(6)..(7)..(8)..(9)..(10): n = A, C, G or T
nnnnnnnnnntatctccgacggctcggtacgaggccgtcggagataaccttatgtccgacggctctgtacgaggccgtcggagataaggcctatgta

SEQ ID NO: 6156 - DNA, 101 bp, Zea mays
gagtgttttatttttgacactcggcaaagagtttctttgccgagtgtctttttttatactcggcaaagggctctttgccgagtgtcacaaatacaacactc

SEQ ID NO: 6157 - DNA, 172 bp, Zea mays
ttggagaaaaaacactcggcaaagagctctttgccgagtgttgtatttgtgacactcggcaaagagccctttgccgagtataaaaaaagacactcggcaaagaaactctttgccgagtgtcaaaaataaaacactcggcaaagagcttcttcgccgagtgttttcttttacc

SEQ ID NO: 6158 - DNA, 74 bp, Zea mays
acgccgatcaggctgcgttggtaatcggctgagttatggcattagctgaatattgactgcgccctggcaacacg

SEQ ID NO: 6159 - DNA, 215 bp, Zea mays
aaaattacacggtgtccaatttgttgggcacagctgcacccataaaaaagactcaattatatgataggtgataaaaggcttggcgattcaaaaaaaacgcagttaccgctcccacctcgccaaatcaaatggcatatttgtttaccctagtgctgagaattgggccggccaagtctatcgtgcttcgtgccaaatggattcgaaccaggaaagca

SEQ ID NO: 6160 - DNA, 79 bp, Zea mays
actcgggcctgcgacgcacgggcactcacctagtgtattatataagataggtgagtgcccgtgcgttacaacggcaaca

SEQ ID NO: 6161 - DNA, 79 bp, Zea mays
tgttgccgttgtaacgcacgggcactcacctatcttatataatacactaggtgagtgcccgtgcgtcgcaggcccgagt

SEQ ID NO: 6162 - DNA, 133 bp, Zea mays
gctgaccgctgagcgtgtagccgcgtacagattgaaagcttagggcgtgtttgtgaccttggcccagctcggcccgttcaactggtccaggctgaggctagcctgtcccggctactgcaactcattttgtttg

SEQ ID NO: 6163 - DNA, 104 bp, Zea mays
cgagctaacgagccacgagcatttcgttcagccctatttccttgctacttcgctctttgggcctttaatagggctggacaaaatgctcgttgttcgtcggcttg

SEQ ID NO: 6164 - DNA, 86 bp, Zea mays
catgtcacacctcggcgtcataggatgtagcaccgagatgtgttacctcggcgccatagcctatggcgccgagcatcgagtccaaa

SEQ ID NO: 6165 - DNA, 207 bp, Zea mays
tggtcgctgccaccaccaggaggagggtacacaaagtgggactcgacaaaagttgatctagctggttcagtcccacccccacccgttccaggcgtagcctatgtaagaatgcaaatatcaataagttaagtatacaaatgtataaaatcataagaatatttcgagagttacaaaatgtatctggtcttcaggtgcaggtagggatga

SEQ ID NO: 6166 - DNA, 77 bp, Zea mays
atcctcgggcccctggggcccattggtcagagagagcgcatcagaggaggaccactggctaccagggggctggggcc

SEQ ID NO: 6167 - DNA, 252 bp, Zea mays
gtcgtttttagaccctttgtttggtgcgtagaccatgatgtattcagtagatctggccaatactccggttttggtacgacgggacataggagctcagcgccataattaatggcaccgagcaacaccacatagacgccaacgcaataggaggagtcctgtgcactatgtacctcggcagcataggctatggcgtcgagcggtattatctcagtgccatggtctatagcgccgagcaaagggtccaaaaacgat

SEQ ID NO: 6168 - DNA, 215 bp, Zea mays
tcgctcggtagccaggctccccacgcgcggcagctcgctcgcagccgcattcgctcgcgcagccccgcatgctagggtttcccgagctctccctcgagctggatcccgcgtgctagggtttgccgtcgtctcggccgggtacaccatctccactcgccctccctatctccctcgagctggatcccgcgtgctagggtttggcgccgcctcggccg

SEQ ID NO: 6169 - DNA, 150 bp, Zea mays
ggatgtttttagggtctgtttggttcgctgcctaacttgtcacactttacctaacttttctgcctaaggttaggtcttcaatttgaacgactaacctgaggcaaagtgtggcgcagttaggcacgaaccaaactggcccttagtgataat

SEQ ID NO: 6170 - DNA, 148 bp, Zea mays
ctaatagagcacgggtgagttcgcctgtcgacatgcattacgcctctgtttgccgagtgtcatcctatgaaggctcgaatcacatatgcatgtaaccagtagaaggcacgatgcatatcgtcgtcggcaagctcgctcatctgcatca

SEQ ID NO: 6171 - DNA, 144 bp, Zea mays
aatatttagggcctgtttggttcgtggttaactacgtcgcactttgtctaaggttagtcgttcaaattgaagaactaaccttaggcaaaaaagttaggtaaagtgtggcaagttatgcagggaaccaaacatgcccttagtttg

SEQ ID NO: 6172 - DNA, 184 bp, Zea mays
gatgattgatgtttggtttctatggactaatgtttagtccattcgttttattctattttagtctataaattgctaaatatagaaactaaaatagagttttagtttctatatttagcaattttgtaatggaataaaatataggaactaaaaattagtccctagaaaccaaacacgcctgagtaag

SEQ ID NO: 6173 - DNA, 147 bp, Zea mays
cggtccgcacctgacagcttgttcgctgcggctttaatccagctgcggctgcgtcttctacagtattttgtctctatggattgcagctgcagcagtccgaacggctttaatccagccgcagcgaacaagccgtgagaattaagatac

SEQ ID NO: 6174 - DNA, 167 bp, Zea mays
ttgttggcttgtgtgacattgcagcgtggacctacacaacaagatactatcatgtgttccacaacagtgttgtgacttaacgactagttgggacttgggagctaggagtaccgagtatttatgtcccttcttccaccttccacctgtcatgtcacgcatttcctcct

SEQ ID NO: 6175 - DNA, 232 bp, Zea mays
acagttgagtggagtggctgtctgcgggattcacggcgtagtaggtggccaagactgagctcgggcgaggcgaagaattcgcccgagggtcgaacttgacgtcgggtgaggcggagaaatcacccgaaggctggacccggggtcgggcgaggcggagaggttgtgccatcggactgaatactgcttcgggcgaggcggagagattgcgccggagggtcagtctgctcggctt

SEQ ID NO: 6176 - DNA, 128 bp, Zea mays
ggttggcgtcattgctgctgcgggtgattgtgacaggccactgtgggacttcggctcggcatcaatctggagccgaaaggaaccaaatgaatgatggcatttactagtagctagtagtatgctgggtg

SEQ ID NO: 6177 - DNA, 133 bp, Zea mays
agagctagtttggaagtccaaataacggaggagatttggaggagctaaaattcacttcttattcaattttgaataaggagggggattttagccctcgaataccctccggttttgtggcttctaaactagccct

SEQ ID NO: 6178 - DNA, 150 bp, Zea mays
aggaaccctgaggtcctgttcgtttacatcggattgtacccggaattattctagctaatcaaagtttatataaattatagaagtaatccggctcggaatcgttccgacccaccaatccgacacaaacgaacaaggcctgagtttggttgg

SEQ ID NO: 6179 - DNA, 240 bp, Zea mays
gttaggaggtgtttagttacacctcgctaaaatttagcccctgtccaatcgaatgtttgaacctccgttccggatattaaatgtagtcggattataaaactaatttgtcagccgaagattaaaagacgagacgaatctagtccagttggttggatctatatttcatactcctatttaaaagtcaaacgcttgatgtgacccaagctaaactttagcaggagcaaccaaacacccttttat

SEQ ID NO: 6180 - DNA, 140 bp, Zea mays
cataaagggcatgtttggtttgtggctaaatgtgccacactttgcctaaggttagtcgtccgaattaaacaactaaccttagacagaaaagttagccaaagtgtggcaacttaggtagtaaaccaaacatgcctaaagac

SEQ ID NO: 6181 - DNA, 70 bp, Zea mays
agcaaggtaaaacgggttcaacggctcgacgacaaacgcgagcacgcgtgaagcccgatggacgaagagc

SEQ ID NO: 6182 - DNA, 127 bp, Zea mays
cacttcccactgtgtagctcgtttggctcgtgaaaatcaagtttggctcgttaagaactgagctaaattgttggctcaactcatgacccattttcaacgagccgagtcgagccaccagttttttgtc

SEQ ID NO: 6183 - DNA, 78 bp, Zea mays
cctgaactgcgccggatcggaggatgtcatgcgcgcacctcgcgccttccgtggacatcgtttgatcctcgtgcctcg

SEQ ID NO: 6184 - DNA, 112 bp, Zea mays
aatctcttttagggctgatttggtgactaggtatcatgaagggattggaggagattgagagcctccaatccctcagtgatcccttgtcaccaaatgaacccttatagcctct

SEQ ID NO: 6185 - DNA, 201 bp, Zea mays
accaagggtgtgtttggttgcgagacagccaggacagagacgtcccctgacgtcctcttttgtctctctaattttgagggataactgggaacaacactgagatagtcatgtcccaatatttgatcctgagccaaataatcttatttgagggattgtctcatcctgtcccgtcctgtcattgcaactaaacacaccccaaca

SEQ ID NO: 6186 - DNA, 189 bp, Zea mays
ggtgtgtttagttgcaatgacaggacgggacaggatgagacaatccctcaaataagattatttggctcaggatcaaatattgggacatgactatctcagtgttgttcccagttatccctcaaaattagagagacaaaagaggacgtcaggggacgtctctgtcctggctgtctcgcaaccaaacacacc

SEQ ID NO: 6187 - DNA, 89 bp, Zea mays
tcacgccttcggctcaggcacgacccggtgactgggtcgggccggcacgggttcagttcactatgtgtcgtgccgggccaaacccgtgc

SEQ ID NO: 6188 - DNA, 72 bp, Zea mays
aggatcactggagcctggctctggagatgcgatcaatctgctcgtatctggtgagcctggcccagggtgctt

SEQ ID NO: 6189 - DNA, 72 bp, Zea mays
aagcaccctgggccaggctcaccagatacgagcagattgatcgcatctccagagccaggctccagtgatcct

SEQ ID NO: 6190 - DNA, 119 bp, Zea mays
atatttttctagactcagtgagcatacagagtggacggtggattaaacacaaaagacgttttagttgaagttgtacacaattcaacatgagtcatgttggctagagggtggaaggctag

SEQ ID NO: 6191 - DNA, 71 bp, Zea mays
tctcttggcaccgcccctgcagtcctgaactcctgattgtcggcggctacaccggcggctaactggctaca

SEQ ID NO: 6192 - DNA, 87 bp, Zea mays
cgtcgggctgcggctgcggctgcggctggtagtaggaggggttggcgtggcccatgccatcgccactgccgtagccgtagtacgggt

SEQ ID NO: 6193 - DNA, 156 bp, Zea mays
taacgatgcactaggggcatgtttggttcgttacctcaattgccacaatttgcctaacttttctgtctaaggttagttattcaattcgaacaactaaccttaggtaaagtggggcatagttagctacaaaccaaacaagccctaggtgattgagtt

SEQ ID NO: 6194 - DNA, 101 bp, Zea mays
aggggtaggcggcgccacagattttggcgcctaccccctttaaactatacaacaacgtgtttggaggtaagcaccaagatctgtggcgcctacccctttaa

SEQ ID NO: 6195 - DNA, 141 bp, Zea mays
tgttcaattaagggcctgttcgtttcacatggaatgaaggggtggaataaatctggcttggattccttcaataattactataattttggagatttggaattaatcctggtctgttccagcagaaacaaacgagccctaaat

SEQ ID NO: 6196 - DNA, 69 bp, Zea mays
tccgctgatggctgctgctgcctttcagttcgtttcacaggcaggcaggcaggcagcgtctgaactagt

SEQ ID NO: 6197 - DNA, 246 bp, Zea mays
ctgatgaataggtagccgttggagggagtaccagggaagcgataagaagccatttactactggcagccattctcagcttgagttggagtagggtcgggtcagaggtcagaggcattcaagcccgtgcgtcagccccggccgtcaccaaggaaggctgcaatggcttggcatatgtggcccgtcaggctcacagctcacctcattcaagccccatcagactgtcttcagcggttgcccctaaatttg

SEQ ID NO: 6198 - DNA, 191 bp, Zea mays
  unsure (145)..(146)..(147)..(148)..(149)..(150)..(151)..(152)..(153)..(154): n = A, C, G or T
taaaagacaccgtatcttatgagcaaggagctctgctgctcccatgagcaaaatcaatccagaccacaccctccacatccaacggtgttgcgtcagggggtttttgtaaaatgtacagagttgcaaagaacatttacaaaaaaannnnnnnnnnacctgctccttgcgcacaagatacgttctcatagtaa

SEQ ID NO: 6199 - DNA, 139 bp, Zea mays
gactaagggcatgtttggtttgtggctaattatgcctcactttgtctaaggttagtcgtttaaattgaataactaatcttaggcaaaaaagttaggcaaagtgtggcaaattagatagcaaaccaaacaggccctaaaa

SEQ ID NO: 6200 - DNA, 191 bp, Zea mays
gctaaaatttagcccctatcacatcgaatgtttgaacctccgttcggagtattaaatgtagtcggattataaaactaatttctcagccgaagattaaaaagtgagacgaatctagtacagttggttgggtctatatttcatactcctatttgaaaatcaaacgcttgatgtgacccgggctaaacgcttga

SEQ ID NO: 6201 - DNA, 153 bp, Zea mays
gacgtcagatgaagatcgtgtggctggcaaggcaagtggtgacgtggacaaacgtgatgcaggctttgctcccgcgtttaatatatagaaatagcgctgtgttcgagctatgtcacaatttagtagtgggtggcaggatagtcagttaagccg

SEQ ID NO: 6202 - DNA, 255 bp, Zea mays
ctaatatttttataccaaaccatgaactcgttattcattacataaattttggacaatgatcttattaatcattatgatacttattgattataaaaataataagcatattggagataaaaacccgcgggtaacccgtgggtacccgcaaacccgatgggtacgggtttgggcaaaatttcaaacccgtcatgggtacgggttttttagtgggcgtaaatatttttcacgggtacgggtttgggatagcaaaaccca

SEQ ID NO: 6203 - DNA, 139 bp, Zea mays
acatgttaatgggctgactggtgttgggcctgtaactgcgatagtccggcactgtagtcgggtacccgctaaccgggtacccgtatccgacccggacttctcgggtatttgccggatagtagtcatcccgtatcctact

SEQ ID NO: 6204 - DNA, 235 bp, Zea mays
aacgtgctgtgcgcactcgcgtcgctcgcggggttcgacaggtgctcatccgctggaagggagaacccgcagcatcctccacatgggaagacctcgacgccttctccgccaagtacccagcgttccagctcgaggacgagctggtggtcgagggggggagagatgtcatgtacggcatcccctactccaggcgacgtcgcgcccgcgacatacgcagggcagccgagcatgcagc

SEQ ID NO: 6205 - DNA, 151 bp, Zea mays
caacgctttcccgacgctcttgcttggggacaagcaacttctccagagggggcagatgtcaggcttgtgcctaactgacaaggcgtcatcagagaagagaaaggcaagaggttgctggttgcgtagcattgggcgtgtgtggttgtgtggg

SEQ ID NO: 6206 - DNA, 71 bp, Zea mays
gatgctcggtgccataggctgtggcgccgaggtaacacatctcggcgccacaacctatggcgccgaggtat

SEQ ID NO: 6207 - DNA, 74 bp, Zea mays
tgcatcggtagagcctggctctggagaaacgactaattcctacgtatctcgggagccaggcccaagggagattt

SEQ ID NO: 6208 - DNA, 79 bp, Zea mays
attaggccttgttcgtttccgtcggattgtaactggaacgattccgggtgcaatctgacataaacgaacaagaccttaa

SEQ ID NO: 6209 - DNA, 182 bp, Zea mays
cgggcgaaggccgtgccgcgtcccgttgtcgtttgggtccatttgtaagcctctctatggcgtaggatcaatagtacgtttagtcaaactttacttaacatcgatgtaatattctagagctgtaaggtgggatattctaggactgtagcaggtaaccgtggacgtaacagggcgtatctacc

SEQ ID NO: 6210 - DNA, 106 bp, Zea mays
tcttggcgccagaggtgacgtagaggaggaccgacagcaatgaccactcgccatcatcggggtagcttttgtgccggcctgcctttaattctcttcgcaaacacat

SEQ ID NO: 6211 - DNA, 217 bp, Zea mays
tgcaatcagaccttatgcacaagcgtgcaaacgagcctcttggtccgttagatcatgatctaactgtagacatgaacgtggtatgttagggggttttctataaatctactcgagccggtggtggaagagtttaaatgttaaatgagatacatgattggatcataatcaaacgaaccaaaaaccttgcttgcacgcttgcacataaggtccaattcat

SEQ ID NO: 6212 - DNA, 188 bp, Zea mays
ctcattgtgcgggggtgtttggtttctaggtactaatttttagtctcttcattttattttataaattatcaaatacgaaaactaaaatagagttttagtttccgtatttgtcaatttagagactgaaataaaataaaatagatggattaaaaattaatcctcagaaaccaaacacccctaacactggt

SEQ ID NO: 6213 - DNA, 158 bp, Zea mays
gaaaaaaaattatgggcatgtttggtttcctgcctaacttgccataatttgcctaactttttctgcctaaggttagttcttcaattcggacgactaaacttaggtaaagtgtggcacagttagccacgaaccaaacaggcccatatatatatatctcc

SEQ ID NO: 6214 - DNA, 100 bp, Zea mays
cttgttcgttgcggcttgctgcggctttaattcgattgcgactacgacttttacagtattttgtctctatggattacagttgcagcagtccgaatagcta

SEQ ID NO: 6215 - DNA, 82 bp, Zea mays
taggctatgtccagcaggccatgtaaacgtcgttgtaaaatactattttacactgtagattgcaatggttgtaagtgtagtt

SEQ ID NO: 6216 - DNA, 144 bp, Zea mays
ggaactaagggcatgtttagtttggtgtctaacttgtcacactttgtctaacttttctacctaaggttagttcttcaattcgaacgactaatcttaggcaaagtgtgacacatttagccacgaaccaaacagtccctaaatatc

SEQ ID NO: 6217 - DNA, 151 bp, Zea mays
aacccttccctaggccttgttcgtttacatcggattgcacccggaatcgttccggctaatcaaagtttatataaattagagaagcaattcggctcggaattgttccgacccaccaatccgacacaaacgaacaaggcactagctggctaga

SEQ ID NO: 6218 - DNA, 70 bp, Zea mays
gacggccactgccgcagcggtgtcccctggcccgaccatctcgctagaggacatcctcgggaacatgtcc

SEQ ID NO: 6219 - DNA, 193 bp, Zea mays
taattaaggggtgtttggtttttagggactaatgtttagtccctagattttattctattttagttccaaaattaccaagtatagaaactaaaactttattttagtttctatatttagcaatttatacaataaaaaaggaataaaatgaagggactaaatattagtccctagaaaccaaacgaccccttaacct

SEQ ID NO: 6220 - DNA, 134 bp, Zea mays
agcataagggcctgttcggttgtccaggattggaaccagaattattccacctgatgaaatcttatataaaagtaaacaattaggcaggaatagtttcaggccacgttcctgagcaaccgaacagcccaaagtcg

SEQ ID NO: 6221 - DNA, 249 bp, Zea mays
caccttaatgagcatcgcactagcacattaatttattcatcgatcgaactattctgaataatttatcagcttaccatttccacagctgacacgaattcgcgagatcggtagcgattttccgatctaggcaatttgtcgagcgcttggggaatatcgcgctgctagcttcgtcttcatccgatttttgggatttcttgatgacgcatgaaacgatgacgagatcgtgtttggagcgagctggtgaggtgg

SEQ ID NO: 6222 - DNA, 77 bp, Zea mays
  unsure (67)..(68)..(69)..(70)..(71)..(72)..(73)..(74)..(75)..(76): n = A, C, G or T
cctttggctcggcgcatagccaatggcgccgaggaacacagctcggcgccataggctatggcgccgnnnnnnnnnna

SEQ ID NO: 6223 - DNA, 170 bp, Zea mays
ggtttgaagtcaaagtaggatgagtcgggggcgccaccgtcccctcgattttttgggatcacgtcgcccccaaaaatcactccggtgctcaacctcgccctcgcttgactctcaaccaaacactatagaaaacgtggccgcctcatctcatccctctttgtacattcaac

SEQ ID NO: 6224 - DNA, 156 bp, Zea mays
tcactcaagcctaggtgctgtttggttcgtcaatagtagcaaatggaaacaaattagagctgtggacgttaccgcaggacatgcaatttgaattaaatttcatttctatttgcgttactattaaggaaccaaacagcacgctagtgtctaattgtt

SEQ ID NO: 6225 - DNA, 89 bp, Zea mays
ccatcctttgccctgtaaggccatgttcggttacaccaatccccctctggattggtctaaccgaacaagccctaatgggaagaatggaa

SEQ ID NO: 6226 - DNA, 73 bp, Zea mays
ttcccattagggcttgttcggttagaccaatccagagggggattggtgtaaccgaacatggccttacagggca

SEQ ID NO: 6227 - DNA, 148 bp, Zea mays
tcgtggctcgtgagctcgctcgactcgtggccagctcggctcggcttgactcggctcgtttcaattttatcacgagctgagctaacatctcagctcggttcgttaacgagctagctcgacacgagctcgagccagctcgttagctcga

SEQ ID NO: 6228 - DNA, 192 bp, Zea mays
atttattatgtgtttggttgcgagacagtcagaacaggagcgtccctctttcgttcctcaaattttaagggataactggggacaacactgggatagtcatgtcccaacccctgaccctgaaccaaacaaacttatttgagagatcgtcccgtcctatcccgtcctgtcattgcaaccaaacatattaaagat

SEQ ID NO: 6229 - DNA, 135 bp, Zea mays
acattctttagggtcgagctggatcgttgtttctactctttgggctggcatgacacgacccaaaagttttttttgggccttctcactccgagtctatttggcccgaagcacgataggcttgctccggccaggcta

SEQ ID NO: 6230 - DNA, 117 bp, Zea mays
gctaatttgggagccacaaaaccggagaggattggagaagctaaaatcctctccttattcaattttaaataattttagatccttcaatcctcttcagtatttggactaacaaactag

SEQ ID NO: 6231 - DNA, 175 bp, Zea mays
gaaattcgcccccgagggggatcgaactcgggacctgaatttgctactcgaaagccttaaccattacgctaagtgctacgtttggtcactacaagatgacactttggactcgtcttagatggtctgagtatcactccttaggtcctgggttcgactctccatgggagcgaaattt

SEQ ID NO: 6232 - DNA, 184 bp, Zea mays
tttcggtgcgccgctgtaagtttgggtatccatgctgtggtttcaagatcagagttcatggcagatagttatgtacacaggcggcaaatttggttcttagcttaggttgatgaccagtttcacttagtacatcttatatgtatactaggtggatgcccgtgcgttgcaacgggaagataaaata

SEQ ID NO: 6233 - DNA, 192 bp, Zea mays
gaaacaagaggacgtttgatttttagggactaatttttatcactctattttattctactttattctctaaattggcaaatacagaaattaaaatagagttttagtttttgtatttgacaatttggagactaagatgggaaaaaatagagggactaaaaattagtccctagaaaccaaataccttctaagtgt

SEQ ID NO: 6234 - DNA, 80 bp, Zea mays
gcagagtgtcagactcggcaaagccttcaccgagtgcgccgagtgtttttctaggctttgccgagtgcttcagacactcg

SEQ ID NO: 6235 - DNA, 72 bp, Zea mays
ttatacccctctgccgcaggcttggttcctagggtagcagccctaaggcgcttgagatgggcataacaagag

SEQ ID NO: 6236 - DNA, 79 bp, Zea mays
ggtctcgcctcgctaggttgctcggcgagcgggttggtcagtagcttcgcctcgctgggttgctcggcggatattggtt

SEQ ID NO: 6237 - DNA, 72 bp, Zea mays
gcgctagtgggatggtcggcctgggcttcctttaactgttggaagcccagggctcccgttatacctgccctc

SEQ ID NO: 6238 - DNA, 130 bp, Zea mays
acaatgtccctgccgccggagcgctccaggacgtcgcagtaccggcgagggcgttcaccgccgcgacggccgcggactcgggaggtcgtcgtcgagcgcgttgtggagcgcgtcgtggcgcctggaacga

SEQ ID NO: 6239 - DNA, 177 bp, Zea mays
tttagcctctgtctcattgaatgtttgaacctccgttccgggtattaaatgtagtcggattataaaactaatttgtcagccgaagattaaaagacgagacgaatctagtccagttggttgggtctatatttcatactcctatttaaaagtcaaacacttgatgtgacccgggctaaa

SEQ ID NO: 6240 - DNA, 153 bp, Zea mays
actcgatattgagggctagtttgggagcaataaaaccgaagaggattgaaggggctaaaatcttctccttattcaattttgaataagaatgtggttttagcccctctaattctctccggtttttggactcccaaactagttttgaagaggaga

SEQ ID NO: 6241 - DNA, 132 bp, Zea mays
aattagagaagcaatccggtcaggaatcgttccgatccaccaatccggcagaaacgaacaaggcctaagggttgttcggttgctcaggaatgatggcttggaactattcgtgactggattgtttacctattt

SEQ ID NO: 6242 - DNA, 135 bp, Zea mays
taagaacgtgggtaccgtcgaacttaaggttaagaacgtgggtttttaagttcgacgggggccgtcgaattttcttccataagttcgatggcacccacgttcttaaccttaagttcgacggtgccacgtggtcgt

SEQ ID NO: 6243 - DNA, 85 bp, Zea mays
ccataaaatcggaggggattggaggggttagacccttttttattcaattgagaatttagcactccaatcctctccggttttcgag

SEQ ID NO: 6244 - DNA, 193 bp, Zea mays
gtgagagagaagcggtccgctacgaagggggcacggtagagggctgcgctgcgggacgtagaggtcacctgtagcccctaagcaatgaataggaataggggagaggagggctagagtgcggcgctgcagacagtcttataaaccattctcatgtatctcttttgttagccccctagagtgaccaaatgttaag

SEQ ID NO: 6245 - DNA, 123 bp, Zea mays
cctaagagtgagggttcctatatgcaccgaggagataaggcccctgagaagtggggggccagggcggtgaccccgagcattagtgtcgtggtacggtagtgttgagcgccttgcgcgatagtg

SEQ ID NO: 6246 - DNA, 135 bp, Zea mays
ctgtcttaagggagatttgttcatcatcatatgagcttcactatctgatgtagagcacaaaacatgtatagctcggctaaggaaactttgaaagttacctgctcacggcgaggtggactaactgctgacgatggt

SEQ ID NO: 6247 - DNA, 107 bp, Zea mays
tccatcctaaggacttgttcggttacaccaatacagaaggggattggtgaggtttaatcaccaatccccttttagattggtgtaaccgaacatgccctaaatgataa

SEQ ID NO: 6248 - DNA, 107 bp, Zea mays
ttatcatttagggcatgttcggttacaccaatctaaaaggggattggtgattaaacctcaccaatccccttctgtattggtgtaaccgaacaagtccttaggatgga

SEQ ID NO: 6249 - DNA, 126 bp, Zea mays
caagacatgtcatagacggagtggtaggggagggtacgcgtgagggtgaggttgacggttcaaatactaacaaccgcgtagcgcgcgaaaaatgccgcgacttgcgactttttttaaaatatgttt

SEQ ID NO: 6250 - DNA, 71 bp, Zea mays
gaggaggggccagtcgggtgggccgcttcaaggtccagctgatcgagcagcccaccggctggcagctggct

SEQ ID NO: 6251 - DNA, 149 bp, Zea mays
tagtggctacagtcagccgtaggaagttagctggctaacttcctaggggctacagtaagccgtaggaagttaggcagctaacttcctagaggctacagtaagccgtaggaagttaggcagctaacttcctaggggctacagtaagccgt

SEQ ID NO: 6252 - DNA, 86 bp, Zea mays
gcaggtcgcgtggggcgacgactcggctagcgcacctgctcacagcggtggtggcgtagcacggcccgcgcccgcacgcctgctca

SEQ ID NO: 6253 - DNA, 150 bp, Zea mays
aagtggattaagggtttgttcgtttgtgtcggattgatgggtcgaaatgattcctaaccgaattgcttctctaatttatataaactttgattaggtggaacgattccgggtgcaatccgacacaaacgaacaaggcttaaaggaggttga

SEQ ID NO: 6254 - DNA, 106 bp, Zea mays
ggcgaaataagactctcggcaacagcctcgtttaccgacagcgagacactatacatagaaagacattcggtaaagggggctttgccgagtgtcaaactctcggcaa

SEQ ID NO: 6255 - DNA, 114 bp, Zea mays
cacgactaacaggctcacgggccgtgcctgggccgcggcagcggcacgccggcccatctgggcacggcacgcttcgctagccgggcctggcgggccgtgccgccgtcgggccgt

SEQ ID NO: 6256 - DNA, 89 bp, Zea mays
  unsure (40)..(41)..(42)..(43)..(44)..(45)..(46)..(47)..(48)..(49): n = A, C, G or T
ctagcacactattcatcagtccagcaggcttcgcatccgnnnnnnnnnnagagtacgtgcccagtctcaggatgagaataaaaaaagga

SEQ ID NO: 6257 - DNA, 87 bp, Zea mays
ctttctctaacggatatgacactagaaggatttccaaacttgaagtatatacgaggacttttggtgtttggttcgctcaagtccctg

SEQ ID NO: 6258 - DNA, 152 bp, Zea mays
ctcccccgttgagggctagtttgggagccataaaatcgaagggggttggagggctaaaatcttctccttattcaattttgaataagaaagagattttagcctctctaatctcttccggtttttggattcctgaactaaccctgaaggtgacg

SEQ ID NO: 6259 - DNA, 102 bp, Zea mays
ccgagtgttttttttgacactcggcaaaaaaactatttgccaagtgttttatttttgacactcggtaaaaagcttttttgccaagtgtcaaatatataaaca

SEQ ID NO: 6260 - DNA, 145 bp, Zea mays
gttgatttaaggcctgtttggtttgatgcctaatttgccacactttgcctaacttttctgcctaaggttagttcttcaattcgaacgactaaccttaggcaaagtgtgacacatttagccacgaaccaaacggccccttatactc

SEQ ID NO: 6261 - DNA, 248 bp, Zea mays
gagatcgacgccggaggggggaatctcgcatcgtcgccaccgtcttcgcttgccttcatgcgtgctgcttccagtacgtgcgcttgacggcgcttgacgggatatgttccacctcctatggaccgggcgccgttcctaggccggggtggcggggaatggccaggctcagccgggatgcagtccatacgaggcttaatcgaacgttattttcttttgggtcgggattccttccaggcggcggaggtcca

SEQ ID NO: 6262 - DNA, 169 bp, Zea mays
aggattttcccacgttgctgccaaactagcccttagaaaaataaggttccaaactagccctaatagagtttttatccattgggtattagttacccattgattatctcttatctttgcagacaataattcaggaaaggaactgcggtctgtgtagtcaacaaagcacgcc

SEQ ID NO: 6263 - DNA, 71 bp, Zea mays
cctctacgctctccagcaacgtcctctaaacggtcctctaaatttagaggtcactgctggattctctatat

SEQ ID NO: 6264 - DNA, 100 bp, Zea mays
gttctgcaatgggtggccatgtatgtgtgagcccatggattatactaattcaataagctagtggtggtgcttgcatgtttgtgggggcccttggattgct

SEQ ID NO: 6265 - DNA, 104 bp, Zea mays
tcgaattagcgccgccgccatcgtcgttatggtccttattgctgttacagctatgctggccgtagtagactaccgtgtacatgagggcggcggtgccgctgctg

SEQ ID NO: 6266 - DNA, 107 bp, Zea mays
aaacgtccgacggccaaagccgtcggacataaggaataaaccgtcggaaatagattatttccgacggtaaagccttatctccgacggctttaagccgtcggagataa

SEQ ID NO: 6267 - DNA, 86 bp, Zea mays
cggcaatcctgcctcgctgggttgctcgacggtttggttggtcggtagcctcaactcgttgggttgcttggcgggcaggttggtcg

SEQ ID NO: 6268 - DNA, 97 bp, Zea mays
cctggcggctgaaaaccgacgggaataagccctaaatcgacgggaattaagtaattcccggcggtatatgcttattcccgtcggtttctggccgacg

SEQ ID NO: 6269 - DNA, 193 bp, Zea mays
aatcctggatgagtcggtacaggaaaccaaacacgagctcattaaatcctagctgagtcggtacagaaaatcaaacacgtaacaaattaactagttgcgtccatgtatacatgctaggctcagcctgcaggctctacccagccgaacaaccaatcagccggtatgtttcctgtgcgcgatttcatcaatttaa

SEQ ID NO: 6270 - DNA, 96 bp, Zea mays
cggaatcgtcctctttgtcgagtgtctcagcaaagcctagaaaacattcgacgaaggctttgccgagtgtgacactcggcaaagagagctcgacga

SEQ ID NO: 6271 - DNA, 141 bp, Zea mays
ctagcacaccaagggctgatttggtgatccgggatcccgggaagatcggaggggattgaaggggaaattagttcatttccccctcaatcctctccagtcctcccgggatccccttgtcaccaaattaaccccaaatgttac

SEQ ID NO: 6272 - DNA, 219 bp, Zea mays
acttatattggctctgtttggcacagcttattttcagcttctttacaaatttaagcagaatttctcctaaacagctagcttccgcagcagcttatcagttcagatgcttctcagaatatactaaaagcagccaacaagcagaagctgcttttcaccagcttatcagataagctgctttttcaacaagcaacagctgtgccaaacagggccattatatgc

SEQ ID NO: 6273 - DNA, 146 bp, Zea mays
catgtcatatgtccatcgggtgacggatatggataccgtatatccatgcccacgaaatttttacacgtggataccttatagtaaccatacccgtacctgcggatacgaaaatccaccatatccgtacccgacggataaataactgc

SEQ ID NO: 6274 - DNA, 138 bp, Zea mays
aaaccagactgtttgcagcccctcacaaaaaggagaatagatcccacctgcaggtgcaacaatacaatcaaaacgtgacctgcagatgaggtctacctcctttctgtgagagaggctacaaacagtctagtttacagt

SEQ ID NO: 6275 - DNA, 137 bp, Zea mays
ctgtaaactagactgtttgtagcctctctcacagaaaggaggtagacctcatctgcaggtcacgttttgattgtattgttgcacctgcaggtgggatctattctcctttttgtgaggggctgcaaacagtctggttt

SEQ ID NO: 6276 - DNA, 97 bp, Zea mays
cgccacacaactcgcgcccacggcatctgaccggcgtcaaaacccaccggcccagcccaacctgtctgcagaaaccgtcggcccaggcgccctttcc

SEQ ID NO: 6277 - DNA, 130 bp, Zea mays
gtgaagaatggggaggggcgggggagggtgataaaatagaggaaggagaggacacggcagctcgctcgcacacggaggagagttatttgagtttgtaacattctcgtcgcgcggcttcaccaatttatta

SEQ ID NO: 6278 - DNA, 125 bp, Zea mays
gttagtttaggagccacaaaaccggagagaattgaaggggctaaaatgtcatccttattcaattttaaataagaagaggattttagcctctctaacccctccagtttttagactctcaaactagc

SEQ ID NO: 6279 - DNA, 70 bp, Zea mays
cgacacccgggccgtgcttgggcctgagtcgtggtacaccgtgctgagcccgagcacggcccgtttaagg

SEQ ID NO: 6280 - DNA, 255 bp, Zea mays
aggccctttgtctctcagcggcaggctggtgcgggcgcaagttggtgtattgtactttgtactattgtacatggatcgaaatcgctttgccatgcagagccgcagaccgccgggctcacgaaaagggaggcagggcttctaaaaagactgcgcctgggcgtactgctgcatgcttgctttgtttggcgcatgccgcgcatctctggttcagggaatcagtccgcacacatgctgctcctgggcggctgggcctag

SEQ ID NO: 6281 - DNA, 198 bp, Zea mays
gctgactcagcgtgtccagcgagacgacaggtatcgtgtattgggcctgcgaacacgatggcccagtctgacaattccagcttcggcatcatcttggtccatctccgcatcttatccatcttccatcggaactctatccggctgctgatcctcctcaacatgttggctcacgtgttgtctgctgacattccccctatc

SEQ ID NO: 6282 - DNA, 214 bp, Zea mays
ctgccgattgcgtgccgtgcttgggccagcacggcccgacgaaaacccgtcgtgctttagggccgtgctgggccttacttctacccaccaggcccaatacggcacggcacgattctatttcgtgctaaccaggcccgactaactgaggcccgaagcacgacgggctcgtgtcgggccggcacggcacggcccaagttgcagcactaacactgag

SEQ ID NO: 6283 - DNA, 78 bp, Zea mays
gctgtttgctgtcgttgcagccattgcataaccataccagccggcgacgtgcaaggactagcagaagcggcacacgag

SEQ ID NO: 6284 - DNA, 153 bp, Zea mays
accaaatattcgggcactcggcaaagaagctatttaccgagtgccacgcaaaaaacactcgataaaagaaaacactcagcgaaaaagctttttgtcgagtattttgtttttgacactcggtaaagagtttctttgacgagtgtaaaaaatata

SEQ ID NO: 6285 - DNA, 171 bp, Zea mays
acttacccacgacgctcgatccggcgccggagcttcccagagtcatcgccgatggatggatcggcaagggtacgggatgaagaggaaggaaaagcagtggttgcggctgcacacaagtaaggctgaagcctggagagggaccgagactcggagagggcgtcaccgtcaggt

SEQ ID NO: 6286 - DNA, 81 bp, Zea mays
cgtcttctgttgcgcctagagaaggcccactatgtgtcctaccggacgtcttaccgggggcctctcaggcgacctatggag

SEQ ID NO: 6287 - DNA, 196 bp, Zea mays
cgcttactgcgtgccgtgcctgggccagcacggcccgatggaagcccgtcgtgctttagggccgtgctgggccttgcttctactcactaggcccggtaaggcatggcccgattctatttcgggctagccaggcccgactaattgaggcccgaagcacgacgggctcgtgccgggccggcacggcacggcccaagtt

SEQ ID NO: 6288 - DNA, 220 bp, Zea mays
cagttaaggactagtgctgcaacttgggccgtgccgtgccggcccggcacgagcccgtcgtgcttcgggcctcaattagtcgggcctggctagcccgaaatagaatcgggccatgccttaccgggcctagtgagtagaagcaaggcccagcacggccctaaagcacgacgggcttccatcgggccgtgctggcccaggcacggcacgcagtaagcgaaca

SEQ ID NO: 6289 - DNA, 199 bp, Zea mays
gtggtatttagggggtgtttggtttctaaagactaatttttagtccctccattttattccattttagtccctaaattgctaaataaggaaactaaaatagagttttagtttccgtatttgacaatttaggaactaaaattgaataaaatggagagactaaatattagtccctagaaatcaaacaccctcttaatgtttt

SEQ ID NO: 6290 - DNA, 191 bp, Zea mays
ctgaataaggggtgttggtttctaagaactaatgtttagtcccatcattttattccattttaatctataaattgtcaagtttagaaactaaaatatagttttagtttctatatttggcaattttggaactaaaatggtataaatgtatggactaaaaattagtccctagaaaccaaacgccccttaagtct

SEQ ID NO: 6291 - DNA, 237 bp, Zea mays
gattcgaagctgaggatatctgacgtggccttctcgttgagccacgctcacttgagcagatcgaggtgcgcggatttgttgcggcggcggtggggaggaggggtgggggatccgcgtggggaaggaccgcgggcgggattggacggcgtgggcaccattgaaaggaggaatcaagcgtggcgagcgggcgggatgcgacggagatagggcgcatgacagctattgcagagggagtgc

SEQ ID NO: 6292 - DNA, 207 bp, Zea mays
gtagcagtacaaaacaccttccaacagggcagccaaacgagccaggcaaaaaggatggaaagaggaaagtcataatagcttgtactgtggctggcagctatttcctttttctgtgtctgagaacatgaccccaccatctgcttcatttgttggactatactaccgctgcctttgtacctgtgttgttgaaagtgtgtgccatatgcc

SEQ ID NO: 6293 - DNA, 110 bp, Zea mays
gccgccgacgcgatcgagcactgcggcccgcgcgggctggcctcgccgacggccttgccgtacgtgcacgcacacctgcccagcggcccagccacgattgcccgcgctgt

SEQ ID NO: 6294 - DNA, 79 bp, Zea mays
gtagagttgaggtggcgggaggtcgaggccagagacgatccacgctaaccggtgcgcccatcgccaccatgcgtccgtc

SEQ ID NO: 6295 - DNA, 191 bp, Zea mays
agcacagagagtgtgggagagcaggcctccgaaaccgccgtccgcagagagacacttgcatggtgtgcgagcgatcaggtttttggagagcgtactcgcgtctgctcgcttcgtccgctcgaccagcactgataaagttcctcgtcgtcggcgccgttcgagggactgcactgcgtacatatgtctgtgtt

SEQ ID NO: 6296 - DNA, 203 bp, Zea mays
ggagacgatcaccaggttcgtctcgcagctggggtcctggtccagccgccccatgtcgatgtcccgccacagcgactcaaggaagcctgcgcaaacgcatgggttcgttgattggtgtgtcaataaataatggtgtggggaggagaagagaagagggagacgatggactgaatcggctcggctcggatcggatgatcgtactg

SEQ ID NO: 6297 - DNA, 140 bp, Zea mays
ttttattaagggctaatttggtgaccggggatcccgaggggaagaaatcctcttgctattcaaaattgaatggcaagggaattcctccccccatggatcctctagggatccctaatcaccaaatcagtcataaaagggga

SEQ ID NO: 6298 - DNA, 106 bp, Zea mays
ttcggattattcggtctattcgggttctcgaatctataccccgaaatatagcacgtatagaaactaaatctgaactcgaaaacctaaattgaccgacaattcagtt

SEQ ID NO: 6299 - DNA, 142 bp, Zea mays
aagagcctttagggctgatttggtgaccagggatcccgaggggaagaaatcctcttgctattcaaaattgaattgcgaggggattcctcccccatggatcctctagggatccctaatcaccaaattagcccttaggaggcta

SEQ ID NO: 6300 - DNA, 175 bp, Zea mays
aggccttcgctcgtgctgcgctgccttttccacggccccagccccaatcccatccagcaggtctcctgctgcctgccgggcaccggccgcaaccaacacaacggagctctagttttccagaagaagaataacccagatggatggaggcaggcaggcaggcagtgatcgatcgctt

SEQ ID NO: 6301 - DNA, 174 bp, Zea mays
actctcgcgattaagggacgatggagatttttgatgcgctagtagagagtccaggaactccgattgatacttttggattggtggcgttagagtctacgaggtggttcatctgaaaaaaaaaacaagtaaacaactgcctcctgtccctccctccctcccttaaaggtttgacga

SEQ ID NO: 6302 - DNA, 76 bp, Zea mays
cccacaaactgcgctcttagctactgccctgtagactcacagcacccgcgcagccagctactgcgcctgctcgtgc

SEQ ID NO: 6303 - DNA, 72 bp, Zea mays
ttgagcccatgtgagaacgaccgcgactggggctgagccctagacccgtcctttggcgtgggacagacgcgg

SEQ ID NO: 6304 - DNA, 154 bp, Zea mays
acatatgattttgttttgctcgaatgtggtagctcgtttagcttgcgagctggcttgttaacgaaccatgctaggatgtcaactcagctcgtaaaaaaattcaaacgagtcgatccgagctgaccataaaccgagcaagccaacgagccacgag

SEQ ID NO: 6305 - DNA, 164 bp, Zea mays
ggtttagtggatgtttagtttctagggacattttagtcattaaattgtcaaatactaaattgtcaaatacgtttagtttctatatttagtaaattaaggcttaaaatgaaataaaatggatggactacaaattagtccctagaaaccaaacatatttttcttat

SEQ ID NO: 6306 - DNA, 138 bp, Zea mays
actaggtgaatgcccgtgcgttgcaacggaaatatataatacaacgataacttatgtacaaatatgtaatatattgttatgagaaaaggtcctcaagcacttatttgatctgagcgacgacgatggagacttcaccgg

SEQ ID NO: 6307 - DNA, 97 bp, Zea mays
gtccaactccagcaacgccgtgtatgtggatgtgttgtactgtttgaaaagagtaattttaaataacgccgtgtatgcggatgtgttgtactgtttg

SEQ ID NO: 6308 - DNA, 254 bp, Zea mays
aatttacataactattggagttgctcttagctgccagccgtggtgacgtataacgaatgacgacgctcgttttcttctggagaggcttcaaagtcttagattgggattttttttatatatgatcatcgttggaatacgctctgatctggctgaataaaggcataacctccctggtaactagagagacgagaaaaaaaggcaggagcagaccgctattgggctaggctaagaccggtccagcagttacatatatg

SEQ ID NO: 6309 - DNA, 125 bp, Zea mays
atagcttcataagggctgatttggtgaccatgcaattggaggggatccatggtgtaggaatcccctttgctattcaaagtatcccttttaattttctggtcaccaaatcagccctacgtatgggg

SEQ ID NO: 6310 - DNA, 125 bp, Zea mays
ccccatacgtagggctgatttggtgaccagaaaattaaaagggatactttgaatagcaaaggggattcctacaccatggatcccctccaattgcatggtcaccaaatcagcccttatgaagctat

SEQ ID NO: 6311 - DNA, 144 bp, Zea mays
cagatttagggtatgtttggttcgctgcctaacttgccacactttgcctaacttttctgcctaaagttagttcttcaattcggacgactaaccttaggcaaagtgtggcacaattagccacgaaccaaacagacctttagtttg

SEQ ID NO: 6312 - DNA, 240 bp, Zea mays
cttaaagtattgaggcagaactgtgcaccacggtatgttgtggacgactacactaaggccttaaggagtagtagagatagagatatcttaagtccaggaaccctgtttggaacgttggttttacttccggtagtttcagaaatttagaactgacaaaactgtaaatctctactgctctataagatgatagtgtagacgtacacacattttggtgcacggttctgcctgcagtcgcccgct

SEQ ID NO: 6313 - DNA, 97 bp, Zea mays
cctgttcttgctcgcgagctaaacgagccaactccagctcgtaaacgagccgagtcgagctgactctatggctcgttagctaacgagatgggacgag

SEQ ID NO: 6314 - DNA, 77 bp, Zea mays
cggattagctagcgggccgtgctgtgccgacccacgggtcccaaacgaggcccaaacacgacccgctagattaataa

SEQ ID NO: 6315 - DNA, 112 bp, Zea mays
ttcatcagtgcgatggcggacttgttgtccaccttgagcttgggagcgagcactgctcctccgatgagctcagccagcagccgtgccaaccagactgcctcgcacgcggccg

SEQ ID NO: 6316 - DNA, 255 bp, Zea mays
  unsure (162)..(163)..(164)..(165)..(166)..(167)..(168)..(169)..(170)..(171): n = A, C, G or T
ccttggtggagcagcggctgctggctcccgcggcgcgcagtgcagccgcccaggccgggcgccgtcgacggttcacaggaatagattagattagatcagatccgaacacatatagcttaggtttcggtcctcggtttcgaatagcgggatgggcgtacccannnnnnnnnnaccttgcaggtggacgcttgtcaccggaacaccagacgcagggcacagagcggtggcggcggatcagcggccgcccagttacgc

SEQ ID NO: 6317 - DNA, 162 bp, Zea mays
cgaatttctggcttggttaaaaaatcctctccttgtgtctcgcccgctcctggttacgtcctgcacgccaccctctggctgggccgttgagtgggcggtgacgacccgctagtgatagtgggccagggtttggggattttctcggccgagaccatgttccgg

SEQ ID NO: 6318 - DNA, 112 bp, Zea mays
tctgaaagtatctttcgaagggtttaaagaaagtcccgctacccgatttactagcgcataccaactccccaagttctccccctgaagacccctgcgaaaggagacattcaac

SEQ ID NO: 6319 - DNA, 138 bp, Zea mays
tcaaacccgacgggttcaggtgcgggtttagaattgcactcgtgggtacgatcgtgggtgggtttatatagactttaaggatgccatcccgggtagaattttgctcaactcaacccgaacctgacccgttttcatcct

SEQ ID NO: 6320 - DNA, 255 bp, Zea mays
tggttgaggatgatagtgagcgttgcggtacgctactggagaacgagcagaaagagagaccgaggagacggaatagagaaggcgtgaggtagaagaaagagagctgtagcagtcaagtgtaatttgtactctgttcttttgataagctctctcctgctacaaggtaacatataagtacacggacgcaggcgctccccaccgcacacaccgtgtcctaggctcgcgcacgcaggcgcacttgtcacacgcattaca

SEQ ID NO: 6321 - DNA, 222 bp, Zea mays
aagacaggacattaagggtgtgtttggttgcgggacagccaggacagggacgtcccctggcgttctctctcgtccctccaattttgagggataactggggacaacactgggatagtcctgtcccaacccctgaccctgaaccaaacaaccctatttgaggaatcgtctcgtctcatcccgtcctgtcattgcaaccaaacgcaccctaagtaccttgagacc

SEQ ID NO: 6322 - DNA, 131 bp, Zea mays
gatatagtgcatgtttggtttgtggctaacactttgcctaacattagtccttcgaattgaaaaactaactttagatagaaaagttagacaaagtatggtaaattagacagcgaaccaaacaaagcctataa

SEQ ID NO: 6323 - DNA, 97 bp, Zea mays
gggtcgaaggcaggcactcggcaaagaagattctttgccgagtgtcagttagatgacactcggcaaagacctctttaccgagtgcctttttttggca

SEQ ID NO: 6324 - DNA, 123 bp, Zea mays
gaccgcaccctccatatctaacggtgttgcgtctattttgtaaagaagcctctacactcttgctctgtacattttacaaaaacctcccctgacgcagcaccattggatgtggagggtatggtc

SEQ ID NO: 6325 - DNA, 159 bp, Zea mays
ttgtaccaagcttgactggctcgtcttattcaaacatttttgcaaaaagatgaaaaattcagagctatacttaaagtgtatttaatgctaaacgataacacaataaaattaataataattatattttttaaataagataagtcaattaaacttagtgta

SEQ ID NO: 6326 - DNA, 165 bp, Zea mays
gctggtgtcttcggttttgctggtgtgctcatttttatcattagtcgtgttttttgttcagttttgttttgtccttctgttctatagcactaaaagggtaaaattgagtaaaaaaacacaactaaggataaaaataagcacatcagcgaaattgagggcaccctc

SEQ ID NO: 6327 - DNA, 176 bp, Zea mays
  unsure (51)..(52)..(53)..(54)..(55)..(56)..(57)..(58)..(59)..(60): n = A, C, G or T
gtgttattccaggcaagccccggtgcatgcaaccccttctgttggtaagtnnnnnnnnnnagtttagcgaaagttttagaagtcctaattcaccccccctcttaggcgtcacccgtttcctacaatgagccacgagccaacaaggaccatgtcattgtcgcatgttggagcgaagg

SEQ ID NO: 6328 - DNA, 117 bp, Zea mays
atgatgttcgccgctactgttttgtttggagaatgtaaacatgttctactcgacagtttccaaatggccacagggcacccaaaacccaccggacagcacagagacggggaaattatt

SEQ ID NO: 6329 - DNA, 143 bp, Zea mays
ctacaactataagggctgatttggtgattagagatccctaggggatccatggaggaggaatctccttgcaattcaattttgaatagcaagaggatttcttcccctcgggatccccggtcaccaaatcagccctaaaaggacat

SEQ ID NO: 6330 - DNA, 152 bp, Zea mays
gactctagaggatccccacactgtgctgtgagtccacgagtaattgttagtagataaaaaattgatagtagatatagaaaatgatattttatagttgtagtggggtatagggggagtatttagggggaaccgctgcgggagataaaagaata

SEQ ID NO: 6331 - DNA, 164 bp, Zea mays
gctggaacaacacccttagggcccgttcggttgtatcggaataaaccaagattcatttcagttcatcaaaatctatataaattagagaagtaatccggctaaaaaataatccggggctccaatccctgacaaccgaacagggccttagggcgtgttcggttata

SEQ ID NO: 6332 - DNA, 123 bp, Zea mays
atgcttaattgtattgccgaagccactggtaccttcattcccgtgtcctccctgctgcttgatatgcttgaaatgaaagaacttagaggacgtccagatggtgttggcaaagccgtgaatttg

SEQ ID NO: 6333 - DNA, 87 bp, Zea mays
caaaggtgacactcgacaaagcgtactgtgccgagtgtcagcctaggtaacactcggtaaagtttgttttgccgagtgtcttacggg

SEQ ID NO: 6334 - DNA, 108 bp, Zea mays
ggttcacggctaactgtgtcacactttgcctaaggttagtcgtccgaattgaagaactaaccttagttagaaaagttaggcaaagtgtgacaagttatgcagtaaacc

SEQ ID NO: 6335 - DNA, 178 bp, Zea mays
gtgcctaggggctaatcgtgccgtgcccgtgccggcccaacggccctaaaccgcggcccaggcacggcactacctatcgggccggcccggaaagggcccgacatcagccgtgccgtgccgtgcccaggcactacgggccgtgccgtgctccgggccggcccgtttagcccggcacgac

SEQ ID NO: 6336 - DNA, 103 bp, Zea mays
tctttctcttgtgtgacttagctcgccgaagtcggacaagggcagaccaccacgtttggtcggccggttcccgcccgctgggttggggaagacaaaggggagg

SEQ ID NO: 6337 - DNA, 180 bp, Zea mays
acggccgcctggggaaccgtcagacataagcttatatccgacggctactggcggccgtcggacataatgcgggacatccgagggctggcagacaggcagtcggacataagcttatgtccgacggctggcagacaggccgtcggacataagcttatgtccgacggtctcctaggtgcccgt

SEQ ID NO: 6338 - DNA, 151 bp, Zea mays
tactaggtgggtgcccgtgcgttgcgacggaaccatataataacttatgtacatataggtgagtgcccatgcgttgcaacgaggatatataatatcacggtaacttatatattatatgtctccgttgcaacgcacggacactcatctagta

SEQ ID NO: 6339 - DNA, 154 bp, Zea mays
atatactaggtgggtgcccgtgcgttgcgacggaaccatataataacttatgtacatataggtgagtgcccatgcgttgcaacgaggatatataatatcacggtaacttatatattatatgtctccgttgcaacgcacggacactcatctagta

SEQ ID NO: 6340 - DNA, 90 bp, Zea mays
cggtgggtccagggctgggaagacactcgcattctctagcccttctcggattgacgcctggtgcgtgtgtctctcggtttggagctgctc

SEQ ID NO: 6341 - DNA, 124 bp, Zea mays
gatatatacatgtatgaccgatgaaaattaatactaactacgttcttaaatatttatcgtccgctagttcatttctatactatattaaagtatcagtttcaacggtcgtcacactttatctttt

SEQ ID NO: 6342 - DNA, 205 bp, Zea mays
gtgcccgccgcgcggggcagcgccgcgctctaccggcccgcgccgccgcccgcggacaccgccggccaccactacctcgccgcggcgcggccgggcgtggcctaccagacggggcagcagtacgggttcggtgaccagctgggctcgttcggcctcagcggcgcgccggcgcagagcggcggcggcggcttcgcgttctcttccg

SEQ ID NO: 6343 - DNA, 189 bp, Zea mays
ggtgcgtttggttgcgggacagccaggacagagacgtcctctggcgtattttcttgtctctcaaaatttgagggataactggggacaacactgggatagtcctgtcccaacctttgaccctgaaccaaacaatcttattcgagggatcgtcccatcttgtcctgtcctgtcattgcaaccaaacgcacc

SEQ ID NO: 6344 - DNA, 192 bp, Zea mays
gctttagggggtatttggtttctagcgactaatgtttagtctctacattttattccattttagttccaaaattgctaaatatagaaaataaaactttattttagtttctatatttagcaatttatatactaaaaaggaataaaataaagggactaaacattagtccctagaaaccaaacagccccttagtca

SEQ ID NO: 6345 - DNA, 200 bp, Zea mays
ggcacgtaatgggcctgtttggtttgtgtcaaaatgtgtcacactttgtctaagactagtcgtccgaattgaataactaaccttaagcataaaagttagacaagatgtgataagttagtcagtaaaccaaatatatcctatatgtcctcgctcggcatgacctatcccggacacgaattaggcatggcccgaattaggca

SEQ ID NO: 6346 - DNA, 236 bp, Zea mays
tttgattagctggaacgattccggttgcaatccggcacaaacaaacaaggtctaagggcctgttcggttattcaggaatctactccaggaaagattccaactggaataattgtataatttgtagtataaattggtaacctgaaatagttcctagccttttccagcctaaccaaacagtgtctaaggtcatgttcgttttggttggattgcacccagaatcgttccagctaatcaaa

SEQ ID NO: 6347 - DNA, 77 bp, Zea mays
tacgcgctacgatgtgagcgtgatgactgggcagtgggcaacatgtgtcgcgtggtccgtgtgcgtcgggcgtccgt

SEQ ID NO: 6348 - DNA, 188 bp, Zea mays
aaaaattttggtacagcccgaatgcaaatcaggtgtttacatcctctcacaaaaaggaggacatatctcacctgcaaatccaccaaataacgttttagttgttgttgctgctgcgggtgaggtttatccttctttttgtgaggggttgtaaacacgctggtttgcatccgggctgcaccaaatttttt

SEQ ID NO: 6349 - DNA, 73 bp, Zea mays
attctcttttggtgttgcgacaccgtctattggactattggactgtatatcgtgttgaagctcattagaggta

SEQ ID NO: 6350 - DNA, 101 bp, Zea mays
ccgtataaaaaggcaggcaggcaggcagagcggggacgagcaagcaagcagttgcagttgcagcggcctcctcctctgcttcctccctcctcctccacacc

SEQ ID NO: 6351 - DNA, 174 bp, Zea mays
  unsure (52)..(53)..(54)..(55)..(56)..(57)..(58)..(59)..(60)..(61): n = A, C, G or T
ggtgcgggatgggagagggtccggacgacggttcccagtggtgatggacgtnnnnnnnnnnggccgcgtatttagtatttacatactatggagagaattaaatgtatttacatatttagtatttacataaatatgcgggccgccgtcgtgccgacccatttatcgtgccgggcc

SEQ ID NO: 6352 - DNA, 150 bp, Zea mays
ctcctcccctgagggctagtttgggaggctcaaagcccagaggattggaggggattttagcctcttcttattcaattttaaataataaggagattttagcctttttaatttattccggattttagacttccaaactagccggaagcggcg

SEQ ID NO: 6353 - DNA, 111 bp, Zea mays
gtccgagcgccgtgagttctccgctgctttccgccgcccaaaaaccgccgggaaggcaaaaaagatacgccctttgcggcgaagctccggggggccttgtggccctcggct

SEQ ID NO: 6354 - DNA, 209 bp, Zea mays
  unsure (120)..(121)..(122)..(123)..(124)..(125)..(126)..(127)..(128)..(129): n = A, C, G or T
  unsure (138)..(139)..(140)..(141)..(142)..(143)..(144)..(145)..(146)..(147): n = A, C, G or T
gtaagtctgtctccagcaacgtcctctatatccatcatctttatccgtcctttacagtctcctctaaaagattctatcatctatatctccttcatctccaacaacgtcctctaaatcacnnnnnnnnnnaccttcctnnnnnnnnnnatttgatcctctatatttatggtacagaaccctttagagtcttttgctggagctagcctaat

SEQ ID NO: 6355 - DNA, 73 bp, Zea mays
tcgcaatccaagtagcaacagacgtcttatttcccattgtacaaattcgtcgtctgttctattgatttgatgt

SEQ ID NO: 6356 - DNA, 220 bp, Zea mays
  unsure (178)..(179)..(180)..(181)..(182)..(183)..(184)..(185)..(186)..(187): n = A, C, G or T
aagtagcccgcgcttggggtcgacttggcttgtctttcgcatcacgtggttaattcacgtacctcggttatgccttggtgtggaggtaaacaagacatcgtggcacacggaataagctcagggcgacatcagaaacactggactcttgttgcaaagtcgaggtgatatttgagacctnnnnnnnnnntttgagacgaagtcgatgttggccggtgttaca

SEQ ID NO: 6357 - DNA, 191 bp, Zea mays
gctaaaatttagtctctgtcccatcgaatgtttgaacctctgttccgggtattaaatgtagtcggattataaaactaatttgtcagccgaagattaaaagacgagacgaatctagtctagttggttgggtctatatttcatactcctatttaaaagtaaaacgcttgatgtgacccggactaaactttagc

SEQ ID NO: 6358 - DNA, 151 bp, Zea mays
caccgcatttagggtctgtttggttcgctgactaacttgccacattttacctaacttttctgcctaaggttagttcttcaattcgaacgactaaccttaggcagagtgtggcataattagccatgaaccaaataggcccctaatatgtcga

SEQ ID NO: 6359 - DNA, 131 bp, Zea mays
tagggtctgtctggtttgctgcctaaggtgccacaatgtgcctaacttttctgtctaaggttagttattcaattcgagcgactaagcttagacaaaatgtgtcgccttaggttgaaaatcaaacagacact

SEQ ID NO: 6360 - DNA, 127 bp, Zea mays
aacatcccccgcggttgcaacgggagcaccgtacacgatgagactggagtagaagctgaagttaggagccgatgggttcaaatcaaccgcagttgtgagggtgcgaatgttgcgcctggagtaggga

SEQ ID NO: 6361 - DNA, 157 bp, Zea mays
acgcacgcattatgggccctgtttggtttgtggctaaatgtgccacactttgtctaaggttagtcgttcgaattgaataactaaccttaggcagaaaagttaggcaaagtgtggcaactgaggtagtgaaccaaacaggccctatatacgcgcggct

SEQ ID NO: 6362 - DNA, 195 bp, Zea mays
gttgatgggccacaactctggcccggcacagacaacacccttttcccatcagagcataggttcgaaccccatcttctgcactatttttaacattttacgctgatttaatcaaatgagctgatgggctaacgggatggctcgacacagtcagcaggccggtatgacgtgcctgagccagagttgtggcctgtgtcg

SEQ ID NO: 6363 - DNA, 83 bp, Zea mays
tccattggccagaggctgttcaccttggagacctgatgtggttatgagtacgaccgggcgtggacggtattctgccttccttg

SEQ ID NO: 6364 - DNA, 191 bp, Zea mays
taggtatatgcccgtgcgttgctacggaatcaatacgataaaatccttcacccaatgcacatgagacaatattgagatgtaccaaaaattgtaatgttaataccttaaaaccactaattcagatgccctttaagctgcaagtgattgggtgaagggcatatgcccgtgcgttgcaacggggacacttatac

SEQ ID NO: 6365 - DNA, 106 bp, Zea mays
acccgcgggtgtggtcgcgggcgggtttgggcttattccgcgggtgcggtcgcgggtgggttttttctccacccgacccgaacccgacccgttgccatctctacca

SEQ ID NO: 6366 - DNA, 133 bp, Zea mays
catccaccgcagtcgcaacagggccaccacacacgatgagactaaaatagaagccaaaggtaggagacgactggttgaaatcccccgcagtcgcagtgacgtgagggtgcgaatgttgcggctggaatagaga

SEQ ID NO: 6367 - DNA, 192 bp, Zea mays
tacttagggcatgtttggttccatgagactaaactttagtccctcttttttagtctcaaaattaccaaagataggactaaaaagaggagaggaaatcagattgatttccttttagtccccatatttagggactaaaatagactataagggactaaagtttagtcctatggaaccaaacatatagtcctagac

SEQ ID NO: 6368 - DNA, 85 bp, Zea mays
cgttgcaggtagctcggcgccaagatctatggcgccgagatgtgtaaactcggcgccatagctcatgacgccgagaaatgggtcc

SEQ ID NO: 6369 - DNA, 126 bp, Zea mays
gcgtgttcgctgcggctgcaatccggctgtggctgcggcttgtacagtatttttctctctatggattgcagctgcagcaatccaaacagctgcaacagtgtcggcttgcagccagccgaacacgcc

SEQ ID NO: 6370 - DNA, 157 bp, Zea mays
catttgtgactagatgagtgcctttgcgttgcaagaagaacatttatcatgaagaacatttatcatgataacttatgtacaaatgagttataatgttataagttatcgtgatatatgtttccgttgcaacgtacggacactcacctagtagagatat

SEQ ID NO: 6371 - DNA, 198 bp, Zea mays
cacttatcctggtgcaagcatgcaatcaaacgatctggtgcatccgatctagatctaatgatgactgttattttatatttaaccccttccacttaaaacatagtacctattttacttttaaccccttccatatgaaaccgttggatctagattggatgctctggatagtttgattgcacgcttgcaccaaaatgagtg

SEQ ID NO: 6372 - DNA, 147 bp, Zea mays
aaagacgtacaccgaccgaccgaccgacctgctgggtcgacgaacgaccgccgccatctctggactcgaccctacctatcgtggattcgtggggggtcgacgaagactgaatagctagcgtgtggtcggccggacggaaccggacaa

SEQ ID NO: 6373 - DNA, 149 bp, Zea mays
ctctatcaagcagtccacagaagcagccaggaagaagggagcctggaagaagggagcggcgtcctaacgtccgactggtgggcccggaatgggcgtgaatgtgcgccatccgtcgcgtgtggctgtgtgtgtggggctgcgtccccgtg

SEQ ID NO: 6374 - DNA, 88 bp, Zea mays
ctctctcccgactcggcggcgattgacttggcgattggcgattcccctccgatgcctccgtcgcggcgccgcccctgtccagcgacct

SEQ ID NO: 6375 - DNA, 113 bp, Zea mays
tccaactaggtatatgctcgtgcgttgctatgataaaacacattgatatgtaaaaaatatcgtgttttataatattgactccgtagcaacgcacgggcatatacccagtaatt

SEQ ID NO: 6376 - DNA, 128 bp, Zea mays
gaatcgcgtttttttgacactcggcaaaacttcttcgacaaatattttatcggcaaagagttatttaccgagtactatttttcggacactcgacaaagattttgccgagtgtcaaaaagctctcggca

SEQ ID NO: 6377 - DNA, 94 bp, Zea mays
taggctctcccagacgccacaccgcgccacactctggtgtggcgctcaaatcggccgccgcaccttaggcgtggtgcggcgccgtaggtgccag

SEQ ID NO: 6378 - DNA, 158 bp, Zea mays
ttacatcctggtcggtcggtcggtttgtcggtcgatacctggatcatgttgtcgtcggagcccagatatagccgcccggccgcgacggacgacggatcgcacaacgaacgccggcgcggcggcagatgagccgagccgagctgagctgggagaggtgt

SEQ ID NO: 6379 - DNA, 84 bp, Zea mays
cgacggcggcgtcttcgcacggatcgaccgggtcgccgctccgcgaagctgcccagtggatccgcgtggacgacggcgtctgct

SEQ ID NO: 6380 - DNA, 173 bp, Zea mays
gacgacgctgcccaaggcgtccagcaccgtggtgtgctactcgcccatgatgataaccaccaacggcatctggcaagggttcaacccgctcgagttctccctcccgctcttcatcctccagacggccgtcatcgtcgtcaccacccgcttgctcgtccttgtgctcaggccct

SEQ ID NO: 6381 - DNA, 157 bp, Zea mays
cagatacactgaccctgtggggctgtggctaactggagtatttagactgtgttcagcggttccctctaaatttctccccctatatcccactcacgtgccacgtcagcgttctctttccccctttttctccacgctctacagcggttccccctatatc

SEQ ID NO: 6382 - DNA, 205 bp, Zea mays
attgtgttctaagttacggccgcgcactgttcatagagcaaataaaaataaaacaaatattggatggtagttgagttagttgatgatgaaagtataaaatattggtgtggtggggtatagaggtttgatatagggggaaccgctgtagagcgtggagaaaaagggggaaagagaacgctgacgtggcacgtgagtgggatatagg

SEQ ID NO: 6383 - DNA, 128 bp, Zea mays
agcaacttggctgatttggtgaccaggaatcgtggaggattgaagaggatcaagaggtaaattggttcattttttcctcaatccatttcaatacctccgtgatccttatcaccaaatcaactctaagg

SEQ ID NO: 6384 - DNA, 119 bp, Zea mays
gcgcggctgctggctcccgctgcccgccggtcgcacgcggcgcgcagtgcagcctccgggtccgagcgccgtcgacggtccaccggaggcaggaggggagcgggaggcgtgcacgcagg

SEQ ID NO: 6385 - DNA, 198 bp, Zea mays
catttatattggtgcaagcatgcaatcaatcaatccggtgtatccaatctagatccaatgatgaatgttactttacaggtaaccccttccacttgaaacctagtacctattttacttttaaccccttccatatgaaaccattgaatctagattagatgttctggatagtttgattgcacacttgcaccaaatgagtga

SEQ ID NO: 6386 - DNA, 199 bp, Zea mays
gacagactaagggggtgtttggtttctagttactaatttttagtccctcaattttattccattttactccctaaattactaaatatagaaactaaaactctattttagtttccctatttaacaacttatgaactaaaatggaataaagtggagggactaatgtttagtctctataaaccaaacaccccctaatttaatt

SEQ ID NO: 6387 - DNA, 156 bp, Zea mays
taagtaggcattatgggcatgtttggttcgttaccccaattgccacactttgtctaacttttctgcgtaaggttagttattcaattcgaacgactaaccttaggcaaagtgggacacagttagccacaaaccaaacaagccctatgtgcaactatg

SEQ ID NO: 6388 - DNA, 83 bp, Zea mays
aaaaccgggattgaaggagctataatcaccttcttatttaatttgaataagaaggtgattttagcccctctaatccccttcag

SEQ ID NO: 6389 - DNA, 118 bp, Zea mays
agtttaggagccataaaaccagagtggattaggggactagatttctcctcttattcatttttaataaaaagtgtaatctaggccttccaatcccctccggttttctcgctctcaaact

SEQ ID NO: 6390 - DNA, 103 bp, Zea mays
aaacaaggcaaagggctgatttggtgacaaagtaaagcaagggattttcttcctatagatccccttcaattcctttgtcaccaaaccagccctatgtctcttc

SEQ ID NO: 6391 - DNA, 150 bp, Zea mays
ctgctgcttcaggccttgttcgtttacatcggattgcacccggaatcgttccagctaatcaaagtttatataaattagagaagcaatccggctaggaatcgttccgacccatcaatccgacacaaacgaacaaggcctcaaagttttttg

SEQ ID NO: 6392 - DNA, 140 bp, Zea mays
acggcctcctacaggaccgtcggacataaggttatgtccgacggccgcaaccggctctcggaaatagccctcatgtccgacggcctgctcttatgtccgacggccctgtgcttatgtccgacggtcctgtacgaggccgt

SEQ ID NO: 6393 - DNA, 184 bp, Zea mays
tcggacataaccttatgtccgacggcctcgtacaggaccgtcggacataagcacagggccgtcggacataagagcaggccgtcggacatgagggctatttccgagagccggttgcggccgtcggacataaccttatgtccgacggtcctgtaggaggccgtcggaggtaagggggccgtcagac

SEQ ID NO: 6394 - DNA, 80 bp, Zea mays
tttctacgtgattggatgcctgctgctcggcagccaggctgtgtgcgtgcgttgactgaccagcagcacctgattgaatg

SEQ ID NO: 6395 - DNA, 215 bp, Zea mays
ccgtggccgagtggaggcaggaagacgagcagcaagctagcgacagtgtcctgacagctggcgatgacggttgggtgggcggccaacgatgatgaactgactgttggacgtcaattggacagcgggcacaacgctaggacgagcgctaagcgggggttggatgctacaaacgtgcggttgatgcctttctcattctgtgttttattcgatatagg

SEQ ID NO: 6396 - DNA, 232 bp, Zea mays
aaaatcgccccccaatgatccccaagaacgacaggattcgatttccgaaatgcaaaatcacaagcaaacaggaatcaatcaagaacgtagggcgtggaggaagggggaagggggcttgtagagctcggacctctggttctcaaggcggagggagggcgtggatgaagaaggagcttgccacctgcggagctcgaacctttggttcttgggggccgattggcggccgcggcgg

SEQ ID NO: 6397 - DNA, 87 bp, Zea mays
tgataattagagcacggcccagcccgcgattcgtgtcgtgctagcccgattttaaatcagccgtgtcgggccgtgctttgttctttt

SEQ ID NO: 6398 - DNA, 89 bp, Zea mays
aaaaaagaacaaagcacggcccgacacggctgatttaaaatcgggctagcacgacacgaatcgcgggctgggccgtgctctaattatca

SEQ ID NO: 6399 - DNA, 171 bp, Zea mays
catagaccgcggtgcacggttctgcctataggtgtacatttgggttgggtctgatgggccggcctgaagcacaggaaaaaagcacggcccaggcacggcacaactcgatatatcgggccggattcgggccgaggtcgcgacccatgggcgggcacgagcacgatccgttta

SEQ ID NO: 6400 - DNA, 86 bp, Zea mays
gatcctctagtgcaggctctggtgctggatccggggctacctcctgagcagctccttgctccggcacgaggacgtactctccgtca

SEQ ID NO: 6401 - DNA, 116 bp, Zea mays
cctttgttgtaccccatccgctctcgggttgcgatgtcctgtgcaccaccctctggttagactgttaccgagtggacagttgacgccgcccggttagtgatagggggctagggttc

SEQ ID NO: 6402 - DNA, 143 bp, Zea mays
tgtttggattgacatatagggcatgtttggtttgctgcctaacttttctgcataaggttagttcttcaattcggacgactaaccttaggcaaaatgtgacacagttaggcacgaaccaaacaggcccatagtccgcaagcttc

SEQ ID NO: 6403 - DNA, 130 bp, Zea mays
ttgcggactatgggcctgtttggttcgtgcctaactgtgtcacattttgcctaaggttagtcgtccgaattgaagaactaaccttatgcagaaaagttaggcagcaaaccaaacatgccctatatgtcaa

SEQ ID NO: 6404 - DNA, 104 bp, Zea mays
ggccaggaatcgatccggaggagacgaggccagggtttgtgccggtccttggagggaagagaaagcaaaaccgggccgagtttacttccggttcaggcccaaac

SEQ ID NO: 6405 - DNA, 250 bp, Zea mays
cgcggatgccgcccgggtgggctcgtgggcaagtaaagccccccgcgcccgcggcccccaccggcgtggacgtacgcgcgggcagcctccactggatccagggtgcggccagccatggcggtggcgtgtcccaaaactacccacatttacgccgcggacgcgccgtcctcacagccagccgagccggcccgttggttcaccacctgctgtccgtgccgtgcccgcccgcccgcccgaggctagctgccat

SEQ ID NO: 6406 - DNA, 229 bp, Zea mays
tttatgcaattttgcaagggggatgctgccgaaattttatatatagatgtcagaagtgttgtttagtagcattccggggtgtttgtggaccctggggtgttacagttggtatcagaggataggctttagattctacgcaatttgaagataaatttgacacacttgcacatataggaagggtatgggttcgtatctctttcatattagtattttattgtatagatgacta

SEQ ID NO: 6407 - DNA, 171 bp, Zea mays
cgtttcttcaggaatagccctggaatttttcaggttgatcaaaacttacataagggcttgttcgtttgtgccgaattggtgggtcagaacgatttctaaccggattgcttctataatttatataaactttgattagctggaacgattccgggtgcagtccaacacaaacga

SEQ ID NO: 6408 - DNA, 158 bp, Zea mays
actaacagaatttgggttttgttggggtttctagaacgaacttagaacgggattagctaagatcacaaccacaaactgcaccgacatggcgtaagttgtgatcttaggagtatatctcacccaccaacaaatcccaacagcaccaagaacacaagaac

SEQ ID NO: 6409 - DNA, 124 bp, Zea mays
tggtcgttagagctcggctcggctcgctttggattgataatgtaatgaattagattggttcgactcggcttggattgttaaagtaatgagttacaaaggatgttgggctcggctcgttacatag

SEQ ID NO: 6410 - DNA, 212 bp, Zea mays
cagagagctgcgcggcggcggccggcgggcgcggaggaggaggaagaagaagagggcgatgaatcgatcaggtaattagaagttacctggcggctgcgacgacgaggaggaggttggaaacccccgggcggcggccggacgcggcctcccacaggaacgccgaccacctcatctctgcctctggctggctggctggctccggtgatctcgga

SEQ ID NO: 6411 - DNA, 249 bp, Zea mays
ctcttttataggccctgtttgggatggctccaggttccagctctagtgtgttgctgtagtttataatatcaatttaaatagtttgaaaatatttttaatctaaataataaaagaaatgacttatctaaatgtcttctaatgacttacagctccagctccatgattttctggagcacctaatgacctgctccaccagttctaccaatttttttggagctggagctatcccaaacaggaccataaaatgat

SEQ ID NO: 6412 - DNA, 252 bp, Zea mays
tgtatatggaagggattaaccgaatagactttttgagatatggattaaatcataaagggattaaatcccaaggggattaagtggaagggagggatccactcaatccctctctggattagatccacttaggccctgttcgtttagcatgttcccggcagggatgagggccaaaaccccgtgacttgaccctgcttggaaagaaacccgatccagaaaaaaatgtgcgttcggttaagccctgagtaggtcata

SEQ ID NO: 6413 - DNA, 121 bp, Zea mays
caaagcgtgcctctttgccgagtgccagggccacaacactcggcaaagaagctataccggtgcccaggttttgcttctttgccgagtgctatgaccatgacactcggcaaagcacctcttt

SEQ ID NO: 6414 - DNA, 79 bp, Zea mays
actaggtatatgcccgtgcgttgcaacggagacatataatacacaagtccccgttacaacatatggacactcacctagt

SEQ ID NO: 6415 - DNA, 237 bp, Zea mays
tgctgccgccgctagacgccttctccgccaccttcttgggcaggagaaccgggttgatgttggggaggacaccgccgtgcgcgatggtgacgccagccagcagcttgccgagctcaacgtcgttgcggatcgccaggagcacgtggcgcgggacgatgcgcgtcttcttgttgtccttcgccgcgttgccggccagctccagcacctcggcggcgaggtactcaagcacggcggcga

SEQ ID NO: 6416 - DNA, 80 bp, Zea mays
tcgccccctcgctgcgatgctcgtgcaccgacctccgcctcccacccgcctcgcttgcatcgctcgcagtgccccaccac

SEQ ID NO: 6417 - DNA, 210 bp, Zea mays
ggaaaaactcttattgctcgtgctgttgcagacgatactggagcctttttctttctaatcaatggtccagagatcacaaaatttatatgtatagataggatcaccaatggattacaaatttttttctcataacaatataacacattatatataagttatcatgatattatatgtttccgttgcaacgcacgggcactaacctagtaatcg

SEQ ID NO: 6418 - DNA, 91 bp, Zea mays
gagtgggctggccacggtggccgtagctctggcggcaatggcgggcggaaatatgctcgccggagctaaggaacggtggctggccggtgag

SEQ ID NO: 6419 - DNA, 105 bp, Zea mays
attagtaatcgtgccgtgccgtgccggcactagtgcctaaccagcggcccaggcactacactatagtgcctaatcgtgccgtgccggcactatacggcactaata

SEQ ID NO: 6420 - DNA, 147 bp, Zea mays
gtaaaccagcctgtttgcagcccctcataaaaaagagaatatgtctcacctgcagactaataacacaactaaaacgttatttgatgaatctgtaggtagggtctatcctccttttttgtgaggggctgcaaacagagtggtttgcaa

SEQ ID NO: 6421 - DNA, 184 bp, Zea mays
aagagtgtgtttggttgcaatgacaggacgggatgatccctcaaattaggttgtttgtttctggatcaagggttggaacaggactatccagtattgtcccctgttgtccatcaaaattggagggacgagagaggacgtcaggtgacgaccctgtcctatctgtcccgcaaccaaacacacccta

SEQ ID NO: 6422 - DNA, 95 bp, Zea mays
tacagaaaggcgggtgaagcggccacatcgacgcgtcattgtggtgagtctgccttagatgacgatgatgaggcagcaacatgcgagaggcagcg

SEQ ID NO: 6423 - DNA, 190 bp, Zea mays
caaggtccgacacccccccccccccccccttctccgtatccttgacattttgttcggttggatccagtagccgggagattcggaatcccgcgcgcgagttgggcctagccagctggcgtcgtagccgcactctgggaggcatgtgggttcgagccgcggagggtaggggtaggggcgggtttcagttgtt

SEQ ID NO: 6424 - DNA, 119 bp, Zea mays
gaggggtgcaagtggagccgtcgcaccgggcgtccgattttggaagggccccaagtaatgtacatgtatatataatcttaggtgttgtgtccagtacggttgctccacttatccctctt

SEQ ID NO: 6425 - DNA, 135 bp, Zea mays
taagaacatgggtaccgtcgaacttaatgttaagaacgtgggtttttaagttcgataggggccgtcaaatttgttcccacaagttcgacggcacccacgttcttaaccttaagttcgacggggccacatggtcgt

SEQ ID NO: 6426 - DNA, 62 bp, Zea mays
actcggtaaagcttcctttgccgagtgacagctgcgcggcactcggcaaagaagcatctttg

SEQ ID NO: 6427 - DNA, 81 bp, Zea mays
tgccacggctacagcactcggcaaagaattttgcaccgggttccaagtgtgctttctttgtcgagtgctatggtcatggca

SEQ ID NO: 6428 - DNA, 250 bp, Zea mays
  unsure (23): n = A, C, G or T
gttagaataagggggtgtttggnatggcttcaggttccagctccagtgtggagctgtagtttataatatcaatttaaatagttttaaaaatatttttaatctaaatgataaataaaataacttatctaaatgtcttctaaagacttacagctctagctccatgattttctggagcatctcatgacctgctctaccaacttcaccaaattttctagagccggagctatcccaaacagggcctaaatatagg

SEQ ID NO: 6429 - DNA, 195 bp, Zea mays
aagggtgtgtttggttgcaatgacaggacgagacgggatgggatgattcctcaaataaggttgtttggttcagggtcaaaggctgggacaggactatcctaatattgtccccagttgtccctcaaaattggagggacgagagaggacgacaagggacgtccctgtcttgtctgtcccgcaaccaaacacacccta

SEQ ID NO: 6430 - DNA, 141 bp, Zea mays
ctatatggtctgtttggtttgatgcctaacttgtcacactttgcctaacttttctgtctaaggttaattcttcaattcgaacgactaaccttaggcaaagtgtgacacatttagccacgaaccaaacactgcgactgacat

SEQ ID NO: 6431 - DNA, 101 bp, Zea mays
ttttggcggccaggaaccgccgaaaataggcctcaagctgccgaaaacaatttattttcggcggcaaacgccctatttttggtggctcctggccgtcgaaa

SEQ ID NO: 6432 - DNA, 150 bp, Zea mays
ttgctggtttggtcgcttggaggctaagtctgtcctctctgtcttcggatcctggcttcgcccctgacgatagggtagagacagcctaacacggaaggcataaggttcagatgtaaacagatcttagacgtcagccgacctaaaaatccg

SEQ ID NO: 6433 - DNA, 157 bp, Zea mays
  unsure (92): n = A, C, G or T
gtatataagattaagggcctgtttggtttgtggctaaatgtgccacactttgcctaaggttagtcgttcgaattgaataactaaccttaggnagaaaagttaggcaaagtgtggcaactgagttagtgaaccaaacaggccctaaagtcaccaccca

SEQ ID NO: 6434 - DNA, 148 bp, Zea mays
attgcatgaaggcttgttcgtttgcatcggattgcacccggaatcggtccggctaatcaaagtttatataaattagagaagcaatccggccgggaattgttccgacccaccaatccgacacaaacgaacaaggccagaggcggcccgg

SEQ ID NO: 6435 - DNA, 149 bp, Zea mays
aaaaaaaagtaggctaatccaacagactctgtaggccgaatgacgggtgaaaggctatccaaaaagaaagagcgaaagtggatgaatggagagctactaaattccaagagtcatttacaaagtctattggaagcggttttcttctaata

SEQ ID NO: 6436 - DNA, 141 bp, Zea mays
accgccgacatgaggtgggcgggcgggcggctccaggtccaggtggcgtcgtcggggtgatgcgcgccgacgtggagacgtggccccttccttcttctacgcaaaatcckccacccacccacccacccccatccatccaca

SEQ ID NO: 6437 - DNA, 99 bp, Zea mays
gatatactgccggaattcagctctttgtcgagtgtccgaaagaaaacgttcggtaaatcatttgtcactcggcaaagagccaaatttcggtagtgcaac

SEQ ID NO: 6438 - DNA, 90 bp, Zea mays
cggcgtcttccacctcctgacgtcccggcgctgaaaaattaaagccgacacgaggaaaaaggcaggcaggcaggcacgctcccgcacgaa

SEQ ID NO: 6439 - DNA, 85 bp, Zea mays
ccacaaaaccggaggggattggaggggctggaataaattgaataagaggaaattctagtctctctatttccctccggtttttgga

SEQ ID NO: 6440 - DNA, 149 bp, Zea mays
actgccctctcaggccttgttcgtttgtgccggattggtgggtcggaacgattccgagccggattgcttctataatttatataaactttgattagctgaaacaaatccggttgtaatccgacgtaaacgaacaaaacctcagtcagata

SEQ ID NO: 6441 - DNA, 157 bp, Zea mays
taacaccctcagggctgatttggtgaccatggaattaaatgggatccatgtgtgaggaatcctcttgctatttgctattccattttgagtagcaagtggattcctccccatgaatcccctccaattccttggtcaccaaactagccctcaattccct

SEQ ID NO: 6442 - DNA, 96 bp, Zea mays
agttatgttagctgcatccacacgtacgtctaaaacggacgtacgcggccggccaggctcgcgcgagatcgtacgtgtgggtacagacatccaatc

SEQ ID NO: 6443 - DNA, 105 bp, Zea mays
gtgggcctcggcgtcggcccaaacacggcccgatgcatcgggccgggccggcccggcccaaaataatttcgtgtcgtgccgtgcttgggccgtgctttttttcgt

SEQ ID NO: 6444 - DNA, 141 bp, Zea mays
agctttgggccctgtttggttcgtggctaatcgtgccacactttatctgcggttagtcgtccgaattgaagactaactttagtcataaaaattaagtaaagtatagtaagttagatagcgaatcaaatatgtccctttaat

SEQ ID NO: 6445 - DNA, 103 bp, Zea mays
gtctggcggcgggcccggtggccacagttcccggcagcgcagcgcagcgaagcaagcgctttggagctgataagactgtcttcagcggttcccctaaatttat

SEQ ID NO: 6446 - DNA, 88 bp, Zea mays
gtactgcagggggcagtagggtcactgcacgcgggccctgtcgcacgtgggggccacgcggcagtgccctctcccacgtcagaggatc

SEQ ID NO: 6447 - DNA, 200 bp, Zea mays
agaaaaccctcgaacccctgccccacccatacacagtggaaccgtacccatgtgagaacgatcgcgaccggggctaggccttagacttgtgctttggcgcgggacaaagcacaggtctaaagcctggtcccgatcgtggtcgttctcacatgggctacgatgtcattgtgtatgggtgaggcaggggttcaaggtttttc

SEQ ID NO: 6448 - DNA, 128 bp, Zea mays
gacatcgtagcccatgtgagaacgaccacgatcgggaccaggctttagacctgtgctttgtcccgcgccaaagcacaagtctaaggcctagccccggtcgcgatcgttctcacatgggtacggttcca

SEQ ID NO: 6449 - DNA, 92 bp, Zea mays
gtgatactaatacattacagacggtccgaatagcctgggacatcccaagctgttttctaaccgaaccgcctgtgatgtaaaaagtctaccgc

SEQ ID NO: 6450 - DNA, 177 bp, Zea mays
agactttttacatcacaggcggttcggttagaaaacagcttgggatgtcccaggctattcggaccgtctgtaatgtattagtatcacaagcggtttttgtttcggaccgcttgtggtgctctattcgtttcacaaacggaccgtaatgaaaaaactgcctgtgattgtgatttgatt

SEQ ID NO: 6451 - DNA, 183 bp, Zea mays
ggccacgcaagcctccgcggccacgcgccacctggtggccgccgccgcttccgcctgggcgccgtcggcgaagccgcggcagctaagctcacagctcgcgctgccgccgtcgtcctcccgcgcgccggccccgctccgcgcgaccgccggggaggcggtgaccgaggaggcgcccaaggggtt

SEQ ID NO: 6452 - DNA, 76 bp, Zea mays
tctagatgcaatgcacggacactgacctatcttatataatacactaggtgagtgcccgtgcgtcacaggtccgagt

SEQ ID NO: 6453 - DNA, 152 bp, Zea mays
gggccgataggctaacaggctggcccgacacagtcagcaggccggcatgacgtgtctgggccatacttcagcaggccgacatgacgtgcctggaccatagttgtggcccgcatgtatctggcccatgtcgggctgccgtttggctatctata

SEQ ID NO: 6454 - DNA, 151 bp, Zea mays
cagccccacgggcctacgggccgagcctacacagtccggcgtgtctcaccagaggcccacacacggcccttcgggccgtttttcgggccgggtcagcccgaaaagccctgatccaaaagagtgttgggtcagcccgaagctcggtaacaaa

SEQ ID NO: 6455 - DNA, 137 bp, Zea mays
attcagttgagcccgtgcgttgcgacgacacacaatcatatttgatgagcaactatgacaatccatttaaatgaaaaataatatatagtcaagtaattagcatttctttaatcttgaacgcatgagttcgcttttac

SEQ ID NO: 6456 - DNA, 159 bp, Zea mays
  unsure (152)..(153)..(154)..(155)..(156)..(157)..(158)..(159): n = A, C, G or T
agcaaaagcaaggctggctggctgcgtggccggtattcatataattagaattgaactgcaagcgtttggtcatgatcgtatgcttttgcgtggcatgcatgcatatatgcacgactatagcaagctcatacagtcgccagcagccagccatnnnnnnnn

SEQ ID NO: 6457 - DNA, 102 bp, Zea mays
gtgttgaaaaaaaaagcactcggcaaagaagctctttgtcgagtgttatatttttgacactcggcaaagagcttctttgccgagtgttttcttttaccgagg

SEQ ID NO: 6458 - DNA, 150 bp, Zea mays
tttactatttagggctgatttggtgacaagagaattagatgagatctatagggagaaatcccttttctattcaattttggatagaatgagaattcctccacatgtattccctctatttctctggtcaccaaatcaacccttaaacttgaa

SEQ ID NO: 6459 - DNA, 152 bp, Zea mays
gggggcggacgcagacaacgacgacggcgtctacggcgtgtccagggcgtcgtcggtggcgtcctcggcgctgctgagctccgcgtcgtcgtggccgctggactcatcggacacttcgtcgtcgtcgtcgtcgttgtcgcgctcctcgtccg

SEQ ID NO: 6460 - DNA, 141 bp, Zea mays
ggtccgtgccaacccagcctgagcacgactaggtcccatacggattagctagcaggtcgtgtcgtgtcggcccacgggctccaagtgagggctaggaacagtccactaggttaataatcgtgccgggctggcccacggcac

SEQ ID NO: 6461 - DNA, 234 bp, Zea mays
gctttatgcattgcataagctgataagcatcttaccaccgcaactatcacccataggagtagccacagctagggctgcctagagttcttttcaacatgtccaatagttgacagattgactcccattaaaatgtaataggcctaaggctacttactgtttcactcctgctaacatatactgtgtgtaaaacaacttaatataagatccgatcagatatgtgtcgatgctcatccc

SEQ ID NO: 6462 - DNA, 108 bp, Zea mays
agccattcaagactttggctagcatctctggtttgcctgtccaaccatatgacaaaagctttcaacagcacaggcaaaaagacagtggtagtatagtccaacaaatgg

SEQ ID NO: 6463 - DNA, 112 bp, Zea mays
actcttaggtctagttttgcaactcttttttgtcaaggaattttcattttatcaagagaaattagttcatttatacttagaaaaatggagttgacaatctagcctttagccg

SEQ ID NO: 6464 - DNA, 124 bp, Zea mays
tagtttgggtactctagtattgaagtggtttggagggattggagagtgtataaatccccaatagatcaaaaactctcataatacatcacaatccactccaatccctttcattactagattatct

SEQ ID NO: 6465 - DNA, 231 bp, Zea mays
ccctccgtcccaaattataattttgttgacttttttgtgccaagtttgactggctcgtcttgttcattttttttgcgaaaaaataaaaaatccaaatgcatacttaaagtatataatatgctagaagatatcactgtaaaaattaacaataattatggaattttttgaataagacgagccggtcaaacttagggtaaaaaggtcaaactaattataaattggaacggaagg

SEQ ID NO: 6466 - DNA, 65 bp, Zea mays
cccttggtcctgcgtgagagccgcaagtaccactgtggacttcgcgcaggatttagatgccgttc

SEQ ID NO: 6467 - DNA, 95 bp, Zea mays
atacattagcggatctggtttcgactaatttcggtcgaaccacgaactgcgacttatcagtgccgaaatcagtttaatccggtctgttgtttcac

SEQ ID NO: 6468 - DNA, 93 bp, Zea mays
accggaacaagtcaggattcattccagctcattaaaatctatataaattagagaagtaatccggttaggaattaatccggggctccaattcca

SEQ ID NO: 6469 - DNA, 130 bp, Zea mays
taaaaccgcctgtgatgtgtgactatcacaggcggttcttttaaaccggaccgcctgtgatgtgtgactatcacaggcggttcttttaaactggaccacctgtgatgtgtgactatcacaagcggttttt

SEQ ID NO: 6470 - DNA, 135 bp, Zea mays
aaattagagaagtaattttggtaggaactattccggtcttccattccgtgcgaaccgaacgggcccttaggccttgttcgtttgtgccggattggtgggtcggaacgattcctaaccggattgcttctctaattt

SEQ ID NO: 6471 - DNA, 106 bp, Zea mays
tttctctagggttgtcggctggttgcgcccgtgccatcctgtctctggtggccttcgtctctgggcagtctcttgtagggtgcacgcagtcttcgccgtggaacaa

SEQ ID NO: 6472 - DNA, 100 bp, Zea mays
tgagccactttttttggctcatgccctctagttcattttggaaaaacacttcactggtgaagccatttgaaaaagaggtgtttggcacaacttttgcatg

SEQ ID NO: 6473 - DNA, 115 bp, Zea mays
ctttagcaaccactccatattttgatctatcttttttataaagtttgagttcatgtgactttatttagaaacttgagctcacaaacttccctcttattgggtctctgtatggtgg

SEQ ID NO: 6474 - DNA, 110 bp, Zea mays
taactggggggtccagcactgacttcgacaccaagcggcagaagcgggaccattaccgcagcatcaaccatgtcgccgtcacgggtccagtcgtgcagacaaagtggtcc

SEQ ID NO: 6475 - DNA, 70 bp, Zea mays
tagggccctggggcctgcgtgggagccgcaggtccccctgtggacttcgcgcaggatttgaatgccttcg

SEQ ID NO: 6476 - DNA, 71 bp, Zea mays
gagggccctgggccctgagtgagagcctctatgttgcgtagtggacttcgcgcaggatctggatgccttcg

SEQ ID NO: 6477 - DNA, 109 bp, Zea mays
tggtggtgtcctcctctatatatagtgcagagtttgggccccgaaggcccatgtggctcatctagccgaaacactaactttgcactatatatagaggaggactctacca

SEQ ID NO: 6478 - DNA, 171 bp, Zea mays
gacaatgatatagccaatgatgacttgccgataaaccctatataacatttattataatgttctagatctggacttcaatatgatatacaaccatatatatatgccatggatttacattggaatgttaaaagaaaaataggtcggcaagtcatccttggctgaaacattgcc

SEQ ID NO: 6479 - DNA, 114 bp, Zea mays
tttgctcggcgctataggctatggcgtcgaagtacgtgctgcgctggcacaaacggacgtcctggtgccgatgtggcaccaagctcggcgccatagatcttggcgccaaattcg

SEQ ID NO: 6480 - DNA, 192 bp, Zea mays
gggtgtttgaatacattagaactaatagttagtgactaaaattagttaaagcattcaaacaccctagctaatagtttatctattagctatttttggtaaattaattaatagttaggtaactatttattagctaccaattctactaacaacttttagtcaactaactactagttctagtgcattcaaacaccc

SEQ ID NO: 6481 - DNA, 122 bp, Zea mays
ctttagcaatcactccatattttgatctatattttgtataagtttgagttcatgtgacttattttataaacttgagctcacaagctttctcttatttggtctctgtatggtggaattatatc

SEQ ID NO: 6482 - DNA, 104 bp, Zea mays
acaagcaaggggagatattgacgcggctcaatccaagaacatggctgccgcgccagtcatccacgccttcggattgaggcacgccaatacctcccggcattgtc

SEQ ID NO: 6483 - DNA, 104 bp, Zea mays
gacaatgccgggaggtattggcgtgcctcaatccgaaggcgtggatgactggcgcggcagccatgttcttggattgagccgcgtcaatatctccccttgcttgt

SEQ ID NO: 6484 - DNA, 227 bp, Zea mays
cactttgcctaacttttgtgcctaaggttagttcttcaattcgaacgactaaccttaggcaaagtgtggcatatttaggcacgaaccaaacacccccttagtctttcacataggtgctaaaagagactaaggggctgtttggttcgtgcctaaatatgccacactttgcctaaggttagtcgttcgaattgaagaactaaccttaggcacaaaagttaggcaaagtg

SEQ ID NO: 6485 - DNA, 129 bp, Zea mays
catatttttcgtttatgtcgctgatttgtccgtcttaatttatttctcatccagtttttttgtgactgatttgtttattcgtctagatttttttatccggcgagcacatcagctgtatatgcagtaaat

SEQ ID NO: 6486 - DNA, 142 bp, Zea mays
gccagtaaaacgtactgtactctaaatatagcggatgtagacgttcggtacgcgtccaacaacatccgctaaaccctccggtaaaaaataatacagggcctccctcatccgctacatttggagggtagacgatggctcgcta

SEQ ID NO: 6487 - DNA, 124 bp, Zea mays
aagtcccgctgtggacttcgcgcaggattggacgccttcagtctcggtgacacatttaagcaatggctgactgaccccttcttgtaaagctgccttcaatcagtgcgaagtcccggcttcgatg

SEQ ID NO: 6488 - DNA, 164 bp, Zea mays
ggttctctacatcttcttgcgcctctactgctgacgggagggaaggaagcagatctggtgattcgtggtaacgtagttctcaacacgatcgacgcatggagaccgtacaagcttccctgacgcctctgaaaggcatgatgaaggaacaaggagaaccctacaga

SEQ ID NO: 6489 - DNA, 148 bp, Zea mays
  unsure (65): n = A, C, G or T
  unsure (120): n = A, C, G or T
atccattgctaagatcacatcaatcccttgggatggcaagacggctaagtctgccaagaacactnccccacttaaaagaatcctcacttgggagcatttgagttggcatagaaggtctgnccctggggttcgggtgaccaatggaatt

SEQ ID NO: 6490 - DNA, 121 bp, Zea mays
cggtgcgcctgtagttggtctttgcgcggacaggttggtgtagggtttatctcgggtagtcttttgaggaagacttcgattctgcgcacttgttgtgcttagtccggctgcacccttacgc

SEQ ID NO: 6491 - DNA, 126 bp, Zea mays
aatcgctacaagctaagcctgcgcgtggtgcattagctgggagcctctcaccattaccgagcacagaagaagtgcaccactgcactgagaaacatttagcgccgctgttggcttgcgtcaagcgat

SEQ ID NO: 6492 - DNA, 70 bp, Zea mays
gttgattcacacaattggtcatcgcgcttggttgaaaaggccgtggagcgaagctaccgtgtgccggatt

SEQ ID NO: 6493 - DNA, 73 bp, Zea mays
tgtgtcgcttcggcggatcaagggttgggaagacactcgcattctcttgcccttctcggactgacgcctggtg

SEQ ID NO: 6494 - DNA, 96 bp, Zea mays
caagaagctgtagaggatccgtctctcttcccataagcacgacagaagaaacacacgagacactggatatagggttgggcctctgacctctttttc

SEQ ID NO: 6495 - DNA, 69 bp, Zea mays
gtcaggcggcggaaatagcattatgtccgacggccgccctcctgacataagctatctccaacggccgcc

SEQ ID NO: 6496 - DNA, 76 bp, Zea mays
agagagacagggcgggggtgagggcgggcttcaccagattgaggtgtggacgcctataccatagccatatagaata

SEQ ID NO: 6497 - DNA, 123 bp, Zea mays
agacactggatatagggttgggcctctggcctctttctgatctctgtaatatgatgaggtgtacaagttccttatatagagatgtgagacccctcagaggcaaaaccggtatttgcccacata

SEQ ID NO: 6498 - DNA, 74 bp, Zea mays
cgtcctctaaacggtcctctaaatttagaggacgctgctggattctctaaatttagaggaccgtttagaagacg

SEQ ID NO: 6499 - DNA, 167 bp, Zea mays
acggagtgtgtcccttggcgcatggctgggcgttcggcgaagtatgcccccggcccccgccagatgccctccttgggcgagcagctagtgcgaagtcctgccttcgtgttggatctgcgtggccgggatcctgccgcattcgtgcgtgaggtggaagacgaggctgt

SEQ ID NO: 6500 - DNA, 163 bp, Zea mays
gagtttctctaaacggttctctatctatttgaatactttaaacaaccggtttagtaaaactaaaatatgtaaatatacatttaagagtatgacaaatacatatgtacaaaaaaaataaaaaataaaaatgtctttaatatagtgtcggggaccataattaggg

SEQ ID NO: 6501 - DNA, 166 bp, Zea mays
agctgaatcagaatccttgccgtgttcgcggatagcgcgtcagatttagaatggtaagccgattcaaaatttccgttagcttgattattaaagtagttcgatgaatgtgatatgcttattttcatgattttgaagcagttgcgtcgcggtaggattaaatatatgt

SEQ ID NO: 6502 - DNA, 177 bp, Zea mays
ttagcccctatcacatcgaatgtttgaacttccgttccgggtattaaatatagtcggattataaaactaatttgtcagccgaagattaaaagacgagacgaatctagtccagttggttgggtctatatttcatactcctatttaaaagtcaaacgcttgatgtgacccgggctaaac

SEQ ID NO: 6503 - DNA, 82 bp, Zea mays
cgcgctcctctctgggttttgcggcggccgccgcgccctcctactcatcggggcatgtcgctcgcccagatgtccgggtgtg

SEQ ID NO: 6504 - DNA, 77 bp, Zea mays
gggtccccgggttttgcggcggccgccgcgccctcctactcatcggggcatgtcgctcgcccagatcgccgggggtg

SEQ ID NO: 6505 - DNA, 75 bp, Zea mays
gctcccgggttttgcggcggccgccgcgccctcctactcatcggggcatgtcgctcgcccagattgccgggtgtg

SEQ ID NO: 6506 - DNA, 115 bp, Zea mays
gatgggccagcacgagcccggcacgaaataaatggcacgtagcccggcccagcacgaaacagaaaaaaccgggccagcacggcacgttatacgggccgggccgtgcttcggctgg

SEQ ID NO: 6507 - DNA, 92 bp, Zea mays
aagtttggacccgatgctcggcgccataggctgtggcgccgaggtaacacagctcggcgccatagcctatggcgccgaggtctgacgtggca

SEQ ID NO: 6508 - DNA, 226 bp, Zea mays
gcagtgaggcgcgggcgccggaggctcgactgcgcgactacggcaagtggttctggcggcgagcgtgcataacagagaagaaatcatgctgaagggagcatgaggtaggaggcaagcacagctcggacttttatagcctaggcgggagagggaattgtggcagaaccacccgaattattccagctataagtgcctaagtcacgcctcaggggccgtcaacacactt

SEQ ID NO: 6509 - DNA, 232 bp, Zea mays
atggtacatgtaggtctacatagtgtaggaacataccacaaaaagtttggtagggataatataaaaaataaaaaagtaattggccggagtgtccacaaatgacactcgagcaaaccatcctttgccgagtgtcatttgtggacactcggcaaattacttttttatttttgatattatccctaccaaacttatagtggtatgttcctacactatgtagacctacaagaaaaca

SEQ ID NO: 6510 - DNA, 84 bp, Zea mays
ttaggtattagtactatggcattcaacctaaatggtttcaatttcaaccaatctgtagttgatagccaaggtcgcgttattaat

SEQ ID NO: 6511 - DNA, 205 bp, Zea mays
aaaatttaaatatattttgccgagtgccccagcttggacactcggcaaagaaagctttgtcgagtgcttgtcgtgcggctctcggcaaagtttttttaaaaaccctaagtctagtctttgccgagtgccaacagacaggcactcggcaaagaagcctttgccgagagccagatcaaaggcactcggcaaagtatattttttaatt

SEQ ID NO: 6512 - DNA, 172 bp, Zea mays
tgcccatgacgtaagccagcgggcggagtctgacgtaaggcctctaggccgcgcggtctctacatttattgcagagagtacatgccgcctgtccaccctactgataggcgaaagacaaacataagcatttaatgtgtcctgtcgactccgctggcaggcggcgccagggcca

SEQ ID NO: 6513 - DNA, 71 bp, Zea mays
gcacagagcactcggcaaagaacctaacatggggaccctacctggcgggctctttgccgagtgctactagg

SEQ ID NO: 6514 - DNA, 76 bp, Zea mays
tgtcgatgttccaggagtgctccaggtcctcgccatttggcgttgtgagcctgtaagcgctgggggaagcttttga

SEQ ID NO: 6515 - DNA, 71 bp, Zea mays
cttgccacatcggctgccacgtaggaaaagttggcgccaatggtactggcgtcgatgtgtgttacctcggc

SEQ ID NO: 6516 - DNA, 159 bp, Zea mays
gtgcctgtcggttggcactcggcaaagtctgtagaacacatctttgccgagtgctctacagctagcactcggcaaaagacacctttgccgagtgctagctgtagagcactcggcaaagatgtgttctacagtctttgccgagtgccaaccgacaggcac

SEQ ID NO: 6517 - DNA, 157 bp, Zea mays
tgcctgtcggttggcactcggcaaagactgtagaacacatctttgccgagtgctctacagctagcactcggcaaaggtgtcttttgccgagtgctagctgtagagcactcggcaaagatgtgttctacagactttgccgagtgccaaccgacaggca

SEQ ID NO: 6518 - DNA, 92 bp, Zea mays
cggattggtgggtcggaacgtttcctagccggattgcttctttaatttatataaactttgattagctggaacgattccgagtgcaatccgac

SEQ ID NO: 6519 - DNA, 83 bp, Zea mays
caccgggcaccgacgacgaagggcggttgcgaagcgtaggattagtgcggaggaaggggctcgtcttcgcgttagtagggtgg

SEQ ID NO: 6520 - DNA, 151 bp, Zea mays
aaccagcccttagggctagtttgggagccacaaaatgagagggaattagagtgactaaaatccctttttattcaaaattgattgagaaggagattctagccacttcaatcctctccggttttatgttcccaaactagtcctcgacactctt

SEQ ID NO: 6521 - DNA, 110 bp, Zea mays
tgagaatagccggggtgggccggtgttgaggcccgggcggggtgaaacgaatgctgttttgtcgtgggccgggattttttccagaccgggctgatccacggggaattggg

SEQ ID NO: 6522 - DNA, 81 bp, Zea mays
aattaaaggcaggtcggccggcacaaaagctatcccgacgatggcgagtggtcattgttgtcggtcctcctctgcgtcacc

SEQ ID NO: 6523 - DNA, 86 bp, Zea mays
agcggtatgtgggaccacttcgtctgcacgactgggccagtgacggcgacgtggttgatgctgcggtagtggtcccgcttctgccg

SEQ ID NO: 6524 - DNA, 79 bp, Zea mays
tttggtctggtgggcgcagtcttcgccgtggaaaaggcaatagaaccggcgcggcggctgctgcgcccgccctcgaccc

SEQ ID NO: 6525 - DNA, 90 bp, Zea mays
gttgctggactctttgagtttgttttggttgcaggtgtcgtgcgtggagcgacatggggaggccgaaacgtgctcgtggaggccgagact

SEQ ID NO: 6526 - DNA, 95 bp, Zea mays
ttccggttcagcccttgtgtcgagcacttggtgaacatcacgaagctagccgcgtgatatttaccaagtgctcggcgaaaggccagaacaagaat

SEQ ID NO: 6527 - DNA, 134 bp, Zea mays
aactttagatgttgttgttgcttcttcatattatatgttcaaattcaaaatagaaacgaatacttttctcaatcacttggacaagtctcaaaaggttttggagaatgcaaggggtcacgaccacaactctaatg

SEQ ID NO: 6528 - DNA, 180 bp, Zea mays
tagagtatccataccaccaaggtgcatcttattttttggaagcctatctcaaaagaacctccaagttaagtgtgtttggcttgaaaaaatttgggacgggtgaccaaccgggaagttttcttgagtgcgcatgaggacaaagtgtgcacaaaagacccatgttggtttgtgggacaatat

SEQ ID NO: 6529 - DNA, 96 bp, Zea mays
gcggagtccttcaccatagggtcttcgactttataaatctcgcgcccaaaatcttcatcagatcggtcgaagacctcatagtgactgcacccctcg

SEQ ID NO: 6530 - DNA, 220 bp, Zea mays
ttcttttatagacattttggacctggtgcgtctgaaccggttggcaacatcgggtcagggatttcgctcagctattggaagcctagggctctaaatacataaactatatatatatatagtttgtatattatgagtcttcggttttcaaaagctagagaaagctctggcctaatgctgcaatccggttaagccgaaccaggtcacggtgtctataaaaaga

SEQ ID NO: 6531 - DNA, 76 bp, Zea mays
gcgatggccctcggtgtcgttagttatttgtagaccctctggactgcggacggctggcgtgccgatgacgtggtag

SEQ ID NO: 6532 - DNA, 112 bp, Zea mays
caaagcatactttgccgagtgccgccgatctggcactcggcaaagtttattttaaaaattaaaaaaaactttgccgagtgccagatcacgggcactcggcaaagaaggcgaa

SEQ ID NO: 6533 - DNA, 76 bp, Zea mays
atcacaattaagggagaccgaacgggttcaaggcattgggcagaatgaacgctttttcctctcctttatccttgga

SEQ ID NO: 6534 - DNA, 148 bp, Zea mays
ctatcaccttaggccttgttcgtttctgtcagattggtgggtcggaactatttctaaccgaattgcttctctaatttatataaactttgattaggtaaaacgattctgggtacaatccgacacaaacaaacaaggccttaatcctttg

SEQ ID NO: 6535 - DNA, 177 bp, Zea mays
cctcggatctagtccgacaaggccactaacaggatcaagtaccacgtactcactcgaaggtgagaaacaaagcaaatacaataaagcataaaaccataatttaaaggaattcttaaagttattacaacatcatcggagtttatcaaaagtagtgatcattgttcggaatgcagcgga

SEQ ID NO: 6536 - DNA, 176 bp, Zea mays
agtaatcggctgattggatgcatgtatggggacgctcaggctcgggtggccctggctgacctaatacgacatttttctgcgtacgagtggatgcaaatggctataaaattgcttattttgcatccacttatgcagcctacgactcccttgtgcaggcaaccaaataggagctcaga

SEQ ID NO: 6537 - DNA, 171 bp, Zea mays
ttacaagagacccgtgcgttgcgacgggaataaaccataaacaataagaaccaattatatgaatttatgagatattgaggtccacaatgtattgttcattttcatgtaataattatgcacttacattttatcaaatattatatgccgtcgcaatgcacgggtatttaacta

SEQ ID NO: 6538 - DNA, 90 bp, Zea mays
agtgccagtcgatactcggcaaagaaaagtgtccgtcacggcaccgggtgacggagacgacgtctttgccgagtgtctcctaatccattc

SEQ ID NO: 6539 - DNA, 95 bp, Zea mays
cggaatccttcaccatagggtctttgaccttaaaaatttcgcgcccaaagttttcatcggaccggtcgaagacctcatagtgtttgcacccctcg

SEQ ID NO: 6540 - DNA, 90 bp, Zea mays
tcctattacaaggccgaagcctatcagacagcccattcggaacccatgactcgaacaattggtttgcgtagacgccggcccatcttcctt

SEQ ID NO: 6541 - DNA, 172 bp, Zea mays
tgtccaaaataaaacactcggcaaagaaactctttgctgagtgtcaaaaataaaacactcggcaaagactctttgccgagtgtcaaaataaaacactctgcaaagactctttgccaagtgtcaaaaaaacactcggcatatagtttctttgtcgagtgtttttctaccgatg

SEQ ID NO: 6542 - DNA, 90 bp, Zea mays
tgtcaaaaataaaacactcggcaaagactctttgccgagtgtcaaaataaaacactctgcaaagactctttgccaagtgtcaaaaaaaca

SEQ ID NO: 6543 - DNA, 80 bp, Zea mays
gctgtctctgagtctaggcgttgagctttgcatatgaggtcttctagcattggtttgacttcgagactgccgttgtttcc

SEQ ID NO: 6544 - DNA, 102 bp, Zea mays
gtcggatataacgacagccgtcggacataatatcctacgttcgacacctggcagaaggaccgttggacataatgttatattcgacggctgtcagataagttg

SEQ ID NO: 6545 - DNA, 84 bp, Zea mays
agtgtcagaaccatagcactcggcaaagaaccaagaactggacaccggtataggttctttgccgagtgtagtggccctggcact

SEQ ID NO: 6546 - DNA, 140 bp, Zea mays
tagctaaaaagactagccaaatttactgatttagctactctctaaaatagattttagagaaaaagtgtaggctaatccaacagactcggtaaacctacgaactgaatagagagtgaagcaggctatccaaaattagagag

SEQ ID NO: 6547 - DNA, 225 bp, Zea mays
ggcgacgtaaggaagtgagagacgccgtgcgggggcctcgggaagagttatcttttctgcttaacggcccgccaaccctggaatcggttcagccggaggtagggtccagcggccggaagagcaccgcacatcgcgcggtgtccggtgcgcccccggcggcccttgaaaatccggaggaccgaattccgtccacgcccggtcgtactcataaccgcatcaggtctc

SEQ ID NO: 6548 - DNA, 109 bp, Zea mays
ctaccggaatcgacctctttgccgagtgcctgaagcactcgacaaaacttgaaaaacactcggcacatgctttgtcgagtgtcgtactcggcaaagagggctcgacgaa

SEQ ID NO: 6549 - DNA, 126 bp, Zea mays
cgtggcacatacctcgacgccatagatcttggtgccgccggtcaacgacccttacctcggcgccaagatctatggcgccgaccttacctcggcgtcaagatctatggcgccgaggtatctgcatat

SEQ ID NO: 6550 - DNA, 93 bp, Zea mays
aagctcgacgtcaagatctgtggcgccgagctagattgccacgtgccctgccacgtcggtaagctcggtgtcaagatccgtgacgtggagcta

SEQ ID NO: 6551 - DNA, 124 bp, Zea mays
gccaaagaaacagtctttgccgagtgccagatcgcgggcactcggcaaagatttttttaaaattaaaaaatatactttgcagaagtgccttggatctggcactcgacaaaggcttttttgccga

SEQ ID NO: 6552 - DNA, 74 bp, Zea mays
acgaaaggctgctcgtccgagcaggagaggaaggaacaactggagctcttgctgccgactgagtatatggagag

SEQ ID NO: 6553 - DNA, 72 bp, Zea mays
gatgcgattgtggagaccgtgctgtcatcgatgaagactatgagaagcagttctgtcgtccgaacattgatt

SEQ ID NO: 6554 - DNA, 202 bp, Zea mays
atcactcggcgtagtctttgtcgagtgtgacactcgacaaagaagtctcggtgaactgtacatcgacaacgatttctttgtcgagtactttttgtcggacactcggtaaagaaaagtcgtcgtcacggcgccaggtggcggtgacgaagactttgccgagtgtctactgtactggcactcgacaaagaagcaccctgtgggc

SEQ ID NO: 6555 - DNA, 137 bp, Zea mays
atgcaatgcaatgacagttagtcggtcacgtctgggcatctagctgcactgtagagccacgatgtctcaacggaggtgccggtgtctccatggcatgtggggctgcaagatgtgaccacgacttggttgctggcgca

SEQ ID NO: 6556 - DNA, 107 bp, Zea mays
aaaatggtatatggacccttgctggagttggtcttaaagggttttctatggggtgtttgatttgaggcaggggtagacccagcgggtggtccatttaggccacgaca

SEQ ID NO: 6557 - DNA, 120 bp, Zea mays
gacgcactcatctcaggactgcttgttatcttaatcttaaaaaaaataaatgatttgctttgctaggggaccggttctcgtggttcaaggacgaggagttcgcgaggcagacgatcgcgg

SEQ ID NO: 6558 - DNA, 109 bp, Zea mays
cttcctgcctgctgctggaattgctgctgacccgccatttccctaaggaagcgggtattgtctgcggtggcattcaccaaggcggcaatcgcctcggctaacgtgggag

SEQ ID NO: 6559 - DNA, 147 bp, Zea mays
gagtgcttcaggcactcggcaaacactttgcccagtgtgacactcagaaaagagagctcggcgaacagtacatcggcaacagcttctttgccgagtactttttatcgggcactcgacaaagactttgccgagtgccagttggtactc

SEQ ID NO: 6560 - DNA, 145 bp, Zea mays
cggcctggcccaagcccgaaaaggcccgtcttgtttgaatttcgggccggtccggcccgtttgaatttcgggtcgtgccggaccggcccacggcctggcacgcaattgattaaacgtgacgggctcatttcgggcgacccgaaat

SEQ ID NO: 6561 - DNA, 191 bp, Zea mays
ctcctaggaagacccggcctcgaaaagtttaatttggagctccctgtttgatccgtcatttcaagctctctgtttggtcacgtagggtgagctgcctccattggtgtataagtgaagtttaggacgtgtttggtagctgacctaagccaccgccaccggccacacttttcccgccgcagttatggcggccg

SEQ ID NO: 6562 - DNA, 136 bp, Zea mays
acacttagcctaatgttagtcgttcgaattgaaaactaaccttagacagaaaagttaggcaaagtatgacaagttaggcatcgaaccaaacaggccctagcttttcaattcgaacgactaaccttagttaaagtgt

SEQ ID NO: 6563 - DNA, 71 bp, Zea mays
tgcttcctgccgacctgccctgccccacgctcgaccagcgaggtgcgcgcagtggagatcgatcggaggcc

SEQ ID NO: 6564 - DNA, 173 bp, Zea mays
ctagaaaagcgtaattattgcgcgtggtcgtatattaataactagtgtttccgtacaaaattgtacaatgccctcgccgctaggtgtttaaattcgccatcgcgtagcactatttagggtgtgtgatattctttgtcgatatgcattcatgtgcattattgcattttcattta

SEQ ID NO: 6565 - DNA, 93 bp, Zea mays
tagttcaccgagctttctttgcctaatgtcacactcggcaaatctttcgttgagtgttttacaggcactcggcaaagaagttatttccggtag

SEQ ID NO: 6566 - DNA, 96 bp, Zea mays
gggccgctggatctccggcggacggccaggattgggtccgggcgagttgaatcagggccgcccgatctgggttgaacggcggagatcggatgggcg

SEQ ID NO: 6567 - DNA, 133 bp, Zea mays
gtctgggcgctgaacacgactgagtgcagggcgactgggttcacccctttccgccttctatatggatcagaggccatgaccccacaagaaacaaagcatgggtccccgcgaacagttgcgtcagctgtccccg

SEQ ID NO: 6568 - DNA, 214 bp, Zea mays
catagtcttttaggatgtgtttggttggatgtacaaggagagatgaaaggggacggccaaagtttctatagtatttggatgagaatcacgtgagagcgagataaaacactggagtaatttttggtggcagcgtgatcccaaaaaaccgaaggaacggtgtcgtcccgtctcatcctactttaacctcaaatcaaacacatttagagttgctctg

SEQ ID NO: 6569 - DNA, 90 bp, Zea mays
gggtgcagccactatcaggtcttcgaccgatctgatgaggatttcgagcgcgacatttacaaggtcgaggaccctgtggtgaagaaatcc

SEQ ID NO: 6570 - DNA, 165 bp, Zea mays
gatgagcatagtgtacgccgcagcacgggcgtactgtctgccaacggaatggacaggcatgccgcctgcaagatggccctggtcgctgtttgtcaacggagtggatggggcacattaaatgctgaggcggcacatcacccgtcagcggggtggacagggctcatt

SEQ ID NO: 6571 - DNA, 83 bp, Zea mays
agtgcaatgaccatagcactcggcaaaaaagtacacctggaaaccggtaaaacttctttaccgagtgttatggtcgtggcact

SEQ ID NO: 6572 - DNA, 83 bp, Zea mays
tgaccctttgctcggcgctatagtctatggcgccgaggtaacacagcttggcgccatagcctatgacgctgaggtacctggtg

SEQ ID NO: 6573 - DNA, 120 bp, Zea mays
gtttatttgctttctttgccgagtgcccgtgatctggcactcggcaaagattttttaaaaattttaaaatattctttgtcgagtgccagatcgctgggcactcggcaaagtgtcctttgt

SEQ ID NO: 6574 - DNA, 220 bp, Zea mays
tgagtgtcacctagtacactcggcaaaggctccgtcgccgttacctggcaccgtgacggcgacttttctttactgagtatcgagtgcccgataaaaagtactcgacaaagaagtcattgccgatgtacagttcgtcgagctttctttggcgagtgtcacactcggcaaagcattcgccgagtgttttacaggctttgccgagtgtccagctgattccagt

SEQ ID NO: 6575 - DNA, 114 bp, Zea mays
gtgaaatcgtgagggtcggctctgataccatctataacaccccattcactcctggataagcggtacttactcctagtagccctctaggatcaaagaccatccccacataccatc

SEQ ID NO: 6576 - DNA, 145 bp, Zea mays
ctggtgatgatggtgttaagtgccggtgggctcggccttcttataagtctaagtaactgttggggtcttgttctcaaatgctatgaattaagaacaggcaacataaaatgttaaatatcatgccttcgtcgcgaaacattatctc

SEQ ID NO: 6577 - DNA, 93 bp, Zea mays
ctactgacaaagccgtcggagataaccttatgtccaacggctagttaaacggccgtcggacataagcttatgtccgacggctagttacgaggc

SEQ ID NO: 6578 - DNA, 253 bp, Zea mays
attacatattgattccgtagcaacgcacgggcatacacctagtttactattatgaccgatagtattatatatacctacatgtatatatattgtcacgaattgttgtatgatttttgaattagattagacttaaaagtacctagattcttattactttgttgttgtcacgtagtccgtaatgtggttattcattcttgttattataacattactaggtgagtgcccgtgcgttgcaacgggaccatataatact

SEQ ID NO: 6579 - DNA, 151 bp, Zea mays
actaccacttaggccttgtttgtttgtgttggattgtacccggaatcgttttagctaatcaaaatttatataaattagagaaacaatccggttatgaatcgtttcgacccatcgatccgacacaaacgaacaagaccttatatagttgcat

SEQ ID NO: 6580 - DNA, 108 bp, Zea mays
tcggacggatcctgttaagttatctggtgcacatgcggacccaataacaagagtctggagacaagggcagaagcatgtgggcccaataacttgggaggtatatcccca

SEQ ID NO: 6581 - DNA, 103 bp, Zea mays
ttcaccttggatggatcggctggtcctggcattcttttgacactggacactcaaggaggtgcttgcctactaagaactagtcccactgtctattactcgggtg

SEQ ID NO: 6582 - DNA, 102 bp, Zea mays
gtggaacgtacctcggcgccatagatcttggcaccgaggtacacgcccggtcaacgacgcctacctcggcgccaagatctacggcgccaaggtacgtgccta

SEQ ID NO: 6583 - DNA, 115 bp, Zea mays
agggattcctagtggttcgggccgccggagcgtaataccctactccactgtgtagaatggattgttgtagactgtttgagctgtgtgtaagcctgaatgacttgtgtctgagtcc

SEQ ID NO: 6584 - DNA, 148 bp, Zea mays
gcaccagagctttcttcgacgagtgcctcagacctaggcactcgacaaaggctccatcacccgttgtcgtcatggtgactttactttgccgagcgcccgatggaaagtaataaccaaagaggccgttgtcgatgatcggttcacggag

SEQ ID NO: 6585 - DNA, 85 bp, Zea mays
tccccgtcgagttcgtggggacgggacgggaaccatcccccgtccccgttccccgtgtacccgccccacgaatcttttttattca

SEQ ID NO: 6586 - DNA, 119 bp, Zea mays
ctacatgatgtaaagctttcgtgccgtataatcaataaatttcgtgtcatattcatagactgattaatatatgtatactagtcgtttgcccgtgcgttgcgacggcttacaacaatacc

SEQ ID NO: 6587 - DNA, 148 bp, Zea mays
ccctcgctgaactccctcgggatgactgcacggtcgcgccatgctttggtctgggcatggtatttgcttagggcctgtagggtgaagacccggtctccttcaatgagatcttttgaagctggctcgtccacgtcggggacggctgacg

SEQ ID NO: 6588 - DNA, 167 bp, Zea mays
tgcccgtgacgtaagccagcgggcggagcctaacgtaaggcatgtgggccgcgcggtctacatttattacggagaggacgcgccgcctgtccaccctgctgacaggcgatgtgccctcagcatttaatgcgtcctgtccactccgctggcaggcgacgccagggcca

SEQ ID NO: 6589 - DNA, 92 bp, Zea mays
tgggatgggtgaccaccgggaagttttctcaggtgcacatgagtgaggacaaactgtgcataaaagactcgtgttggtctgtggggacgata

SEQ ID NO: 6590 - DNA, 74 bp, Zea mays
gcatggcagtggcacgagcgctttgggcaccttaactttgaggccctgaagcggctcagtgccaaggagatggt

SEQ ID NO: 6591 - DNA, 148 bp, Zea mays
taagaacgtgggtaccgacgttcttaattgagttaagttcatgggttaatttaagaacgtgagtaccgacgttcttagtttaaattcatgcgccctagctaaaaccgtcgaacttatcgtattaggaacgtgggtacccatgttctta

SEQ ID NO: 6592 - DNA, 113 bp, Zea mays
gaggtgcgacttgacggcggggatggccggaatcgcccggtccacgagcgcaggcaggtgttctcgtcggtggcgagtgtaccggccaaaccacggcgatctggttcaatcca

SEQ ID NO: 6593 - DNA, 118 bp, Zea mays
taagatttgattagctggaacgattccgggatgaatcctagcgcaaacgaataggccctaagggcatgttcgctttttcaggaatgaacccggattcattccagctcatcaaaattta

SEQ ID NO: 6594 - DNA, 155 bp, Zea mays
gtctgacacgcttaaggccttgtttgtttgtaccagattggtgggtcgaaacaatttctaaccggattgcttctctaatttatataaactttgattagctgaaacgatttcaggtacaatccgacacaaacgaacaagacctaagagatagtgct

SEQ ID NO: 6595 - DNA, 82 bp, Zea mays
gggacatccgcttgctgagttgctcgatagggactttgtcgagacctccatcttgttgatttgctcggtagggacctagtcg

SEQ ID NO: 6596 - DNA, 132 bp, Zea mays
aagaagctgaaaataagctgtgccaaacagggcctacatgctgacgccaaacgcgtggaaaacaaaacaaatgtaacttaggcctgacctagtttttaggctctatttgtaacaacttatttttaggttctt

SEQ ID NO: 6597 - DNA, 71 bp, Zea mays
cttgccacatcggctgccacgtaagaaaagttggcaccaatggtactggcgtcgttgtgcgttacctcggc

SEQ ID NO: 6598 - DNA, 174 bp, Zea mays
aggagatccagcgccaggtgcagacgctgcttgataagggttacattcgtgagtctcttagcccttgctcggttcctgtcttactagatccaaagaaagatgggtcatagaaatataagatgcggacatcaacaccaacacgagcacatctacaccagcagcaccttctccagc

SEQ ID NO: 6599 - DNA, 207 bp, Zea mays
acagtaatcttaggatgtgtttggttgcaggacagctgggatagccgggaacagccacgtcccctctcgtccgttaaattttgacgaacagctagaggcagcaatgagatagtactgtcccaaccactgacactaaaccaaacaaccttatccaagagatggtcacatctcatcatgttattgcaaccaaacacactattagtgatt

SEQ ID NO: 6600 - DNA, 169 bp, Zea mays
  unsure (5): n = A, C, G or T
ggcgncataggctatggcgccgagcaaagggtccaaaaatgacattaaaattttttaagatctaaacgtgaatttttttccgaaaaatggctaaaatacaaaaaattcggtccagccgaaccctccgcggctttggacctccatcggcgccgccgtgtagttccgccag

SEQ ID NO: 6601 - DNA, 135 bp, Zea mays
aagagagttaaggctagtttggtgtgtggcctcccgcgccatgccgtgcctaagccgcggcggtcgaatctgctgcggtaaaactgtggtgcggtgtggcggattagtcgtgctaccaaacagccccttagtttg

SEQ ID NO: 6602 - DNA, 175 bp, Zea mays
ggtccttgccgcttggcgttgtgagcctgtaagcactgggggaagcttttgtcttgactataaaggggccctcccacctgggctccagcttgcccttggactccgtccgagctgtccggacgagtacgaggtccccctcgctgaactccctcgggatgactgagtggtcgcgcca

SEQ ID NO: 6603 - DNA, 78 bp, Zea mays
gttgatttgttggacaggaaaatggattcatgaatctccttgctattcaaaatccaattttctgtccaccaaaccagc

SEQ ID NO: 6604 - DNA, 98 bp, Zea mays
tggcggattccttcactatagggtcctcaaccttgtagatatctcgctcgaaatcctcatcagcttggtcgaagacctcatagtgccggcacccttcg

SEQ ID NO: 6605 - DNA, 199 bp, Zea mays
cacagatctgggagatgcacgaggctttggggaattgctcgtcggaagttggattaagccacagatctgcccctcaacattggcaggggcacctgtgccttattccatggtaaggatcttctcaaatgccttgcctctatccttagctcgtgtagcaccattcagattaaggccttgttcgtttgtatcggattgcacc

SEQ ID NO: 6606 - DNA, 226 bp, Zea mays
caagtgcatgtgggcttggcactcggcaaaggctctgttactgtcacttggcaccatcatagtgacttttatttgtcgagtgtcagatataaagtactcgacaaataggttgttgccgatgatcggttcactgagatctttttgccgagtactacactcggcaaacggcaaaccttttgccgagtgttattgaagctttgccgagtgtctgcaccacttgacaaag

SEQ ID NO: 6607 - DNA, 95 bp, Zea mays
tgttgtatttgtgacactcggcaaagagccccttgccgagtgtcaaaaaaagacaatcagcaaagaaactctttgccgagtgtcaaaaataaaac

SEQ ID NO: 6608 - DNA, 132 bp, Zea mays
ctataaatattttttctagactcagtgagcatacagagtgacgtgggtttaaacacaaaaagacgtcttaggtgaagttgtacacaattcacatgagttatgttggctagagggtggaaaagctagacattc

SEQ ID NO: 6609 - DNA, 73 bp, Zea mays
cactccagtcttcagtgactggcactacagacacctaattgtttgtagtagggggttacaaaagagtgagaga

SEQ ID NO: 6610 - DNA, 118 bp, Zea mays
tctattaacgggatgtttgggagtgaagttttttcacagaatcacacttttggaagaaatactgcagtattcttccaaaactgcagaaaaactttgttcccaaacaccccttagtagt

SEQ ID NO: 6611 - DNA, 124 bp, Zea mays
tgggtgggccgacgggaattaaaataaagcccgtcggctggcggctggccgacgggagttaaaataaagcccgtgggctggaattgagccgacgggagttatttaattcccgtcggcccaccca

SEQ ID NO: 6612 - DNA, 79 bp, Zea mays
ggcgtctgggccgtggctagtctgcgctcggtcggttaggcacgccatcgagcgtgtggcagcgctcggtctggtcact

SEQ ID NO: 6613 - DNA, 76 bp, Zea mays
tcggcagccagaagccgccgaaaataacctactttcggcggcaaagtggttattttcggcggcttctggccgccaa

SEQ ID NO: 6614 - DNA, 76 bp, Zea mays
ttggcggccagaagccgccgaaaataaccactttgccgccgaaagtaggttattttcggcggcttctggctgccga

SEQ ID NO: 6615 - DNA, 182 bp, Zea mays
cactcaccaagtcatggatgagaggagagtggtgtggagagccacacgcgcgcgttcgctcgccttgccagggcggggcaggcgaagacgcgggcacacgacatacgcgtgaatgtccgccgaattcggtccctcgccttgcgggagcgtgctcctttgccagcatccagatcatcccagtt

SEQ ID NO: 6616 - DNA, 127 bp, Zea mays
ggaatcagcttctttaccgtgtgtctgagacacactgcaaaggctatgttacactcggcaaagcatttgccgagtgtaaaatagcctttgccgtgtgtctcagacacacggcaaagaagctgattcc

SEQ ID NO: 6617 - DNA, 103 bp, Zea mays
tttgccgtgtgtctgagacacacggcaaaggctattttacactcggcaaatgctttgccgagtgtaacatagcctttgcagtgtgtctcagacacacggtaaa

SEQ ID NO: 6618 - DNA, 107 bp, Zea mays
ccgccttctttgccgagtgccatttgagacactcggcaaaacgcccgccagggagggtccccatgtcaggctctttgccgagtgtctcaactggcactcggcaaagc

SEQ ID NO: 6619 - DNA, 192 bp, Zea mays
ttatatagaaagatcttggcggcgaacatccagaggacaagcctaatttgttaatatcattatttccatatggtgacaaacaacctccgggtattgtcctgtgcggttattatgtatgcgaatggtgtcgtgtcaccttccattacatggtacaatcgtgaggatgtaagttcgctatcattgtctatgttg

SEQ ID NO: 6620 - DNA, 103 bp, Zea mays
tcttaagaacatgggtacccacgttcttaagttaagttcgtgggccctggataaaaccgtcgaacttaacgagttaggaacgtgggtacccatgttcttaagt

SEQ ID NO: 6621 - DNA, 225 bp, Zea mays
gacaggcggtgtgctcagtccacgatacgtgggccacgcagttactcaccattactcccgcattactcgtacggtaactgcccatcaatgcagcatggattgcggacatcaagactcccactgattactcatgcgttactctatcagcattagttattcacataatgtaattcttccattatgctcctgggcccacatgtcggggctcagcattctagtatgtgc

SEQ ID NO: 6622 - DNA, 106 bp, Zea mays
tgtttgaggaaaactttggttgagaccaattggctagagtgggactgagcatcaacgctctctttacacaaaaaaactttggttgggactaaaatttccaaaacta

SEQ ID NO: 6623 - DNA, 105 bp, Zea mays
aatctccgacggcctaaaaccgtcggacataggttgatgccgtcggacataggttatctccgacggttcaatccttatgtccgacggctttggtcgtcggaaatt

SEQ ID NO: 6624 - DNA, 201 bp, Zea mays
ggctaactgcgccacactttgtctaagcttagtcgttcaaattgaaaaactaatcttaaacataaaagttacacaaaatgtgataatttagtcatcaaaccaaacatgtcctagcttaccacactttgactaacttttctgtctaaggttagttatttaattgaaacgactaacattaggcaaagcatgacataattagca

SEQ ID NO: 6625 - DNA, 110 bp, Zea mays
tggtttgtggctaactatgccacactttgcataaggttagtcgttcgaattaaagaactaaacttagacagaaaagttaggcaaagtgtggcaagtgaggctgcgatcta

SEQ ID NO: 6626 - DNA, 73 bp, Zea mays
ggcccgagcgcaggcgccggaggtcggcggcggctcctgttccggccaaaccacggcgatggggttcaattaa

SEQ ID NO: 6627 - DNA, 76 bp, Zea mays
gtaccagatcaaaggcactcggcaaagtattttttttaattttaaaaaaaatctttgccgagtgccagatcgcggg

SEQ ID NO: 6628 - DNA, 92 bp, Zea mays
cgacaaagagttctttgctgagtatttttttgacactcgacaaagactttgccgagtgtcgaaaagcactcgacaaagaaaaaaaactcgat

SEQ ID NO: 6629 - DNA, 151 bp, Zea mays
aagtagatttaggccttgttcgtttgtgtcggattgcatccggaatcgttccacttaatcaaactttatataaattagaaaagcaatccggtcaggaatcgttccgatccactaatccgacacaaacgaacaagaccttttttttccaaac

SEQ ID NO: 6630 - DNA, 157 bp, Zea mays
agatatacagtctggacctccaagttggtccaggacccccacgtgtacgaaccggacccctagaatgggatccggaccccccccccccccccgtatggggtccggaccgcccacagtggggtcccaagaccttacttaaggcccaggcgggggtccg

SEQ ID NO: 6631 - DNA, 154 bp, Zea mays
aattccccgttagggctagtttgggagtcacaaaaccggtggggattggaggggctaagatcctctccttattcaattttgaataagaagggaattttatcccctctaatcccctccgggtttggaactcccaaactagccctaacggggaatt

SEQ ID NO: 6632 - DNA, 126 bp, Zea mays
agttttatctgtcaggatgcactagttatcgctgcttgcagcaagttatcttggcttctttgaagctagttatctgaagattgatcctacatcgtgaagatcgggcatcgtgacgcatcagggagt

SEQ ID NO: 6633 - DNA, 134 bp, Zea mays
ctaagggtctgttcgtttctgctggaacagaccaggattaattccaaatctccaaaacttatagtaattattgaaagaatccaagtcatatttattccacctctccattccctgcgaaacgaacagcccctaat

SEQ ID NO: 6634 - DNA, 118 bp, Zea mays
gcacgcaccggtccggttagtatagtgccagtccctggcacgatacggatatagtgtcgtgcctgggccactatctcgacctgtagtactggcacggacatgacacggttacattttt

SEQ ID NO: 6635 - DNA, 172 bp, Zea mays
ttgtcgagtacattttgtcttgcattcggcacagtcggctctgccgagtgccgcactcggcaaaatagtactctcggcaaagaaacgtttatcgagcgtgcgacactcggcaaagactaacactcggcaaatcagcctttaccgagtgtcggcgaaatgcaactctcggcaa

SEQ ID NO: 6636 - DNA, 181 bp, Zea mays
cggcgagagcggggcgtggagcgggcccgggggacgtgaccgggaacggccccctcgggggccttccccgggcgtcgaacaaccgactcaccaactggaacggacaaggggaatccgactgtttaattaaaacggagggggtgcgacggtcctcgaggatgctgacgcaatgtgatttctg

SEQ ID NO: 6637 - DNA, 179 bp, Zea mays
acccactcaggaaagaccaatcggcccagaagactagtcctatggggcaggtgtggctctccttttaaggtggtttcctcctcccaagttaagcgaggtgtgataattttaggctcacacggtcgatgtctgactataattgggcaaactgggccaattgcgtctttgccaatgggtaa

SEQ ID NO: 6638 - DNA, 159 bp, Zea mays
ctcaggtacatctaaatgagacagcggcttatttgaacctcaactggttacgcaacctgttcgaattgctacagctgttcagattactgcaagctgtaatacatagagataaaatactataaaaatcgcagccgcagtcggattaggacatatccagct

SEQ ID NO: 6639 - DNA, 66 bp, Zea mays
ccaacacgagtcttttgtgcgcactttgtcctcactcatgcgcacccgagaacagtgacaggtcgg

SEQ ID NO: 6640 - DNA, 158 bp, Zea mays
cgagggcagcgtctccgccatctagcgacgttttcggcaccaggtgactttgtcgaactggtccctcggagggcaaatgttggggcgaaggcaaagacgccacccttcgctcgtcgcctttcgctgcagtcgctggtttgacgaagacaaaacgggca

SEQ ID NO: 6641 - DNA, 123 bp, Zea mays
atcccgccaacgggaggcatctggtgaggggcatacttcgcccagcgcccagccatgcgccaagagccacaccccatacgcgacaaaactcctcaaccagatcgcgccccgctactcaggccg

SEQ ID NO: 6642 - DNA, 198 bp, Zea mays
gaaggtcacctttgtttttttggcccgttttcgtattaactgcatcattctatgaagtttcattaagcatgttgatacatggtgagataaatatcaagttagctttccaacgcatctagccccacgttatttggagattcctagaagaagttattatcaaaatactgaagactgcgcagaagtcaaacacccaccccc

SEQ ID NO: 6643 - DNA, 157 bp, Zea mays
caaacgagccctaaggctttgttcgtttacatcggattggtgggtcggaataattccgagccagattgcttctctaatttatataaactttaattaaccggaacgattccgggtgcaatccgatgtaaacgaacaaggcctaagatgaattgaagcg

SEQ ID NO: 6644 - DNA, 203 bp, Zea mays
tccgaagacttaggccctgtttggaagcacccagtttttaagaaatcggtttatataaattaagatggttccaaacatactagtttatgactcagtttatagaaattagattaccagtttcttaaaaaaatcaagaagctagtctagataaaaactgatttcttaaaaactgagttggttccacacaaaggccttaatggggc

SEQ ID NO: 6645 - DNA, 90 bp, Zea mays
tcattaccggaatcacgttctttgccgagtgtaaaatagcctttgccgagtgtcttagacactcggcaaagaacgcgattccggtagtgt

SEQ ID NO: 6646 - DNA, 79 bp, Zea mays
cgagtgtcgcactcggcaaagagggctcgacacacagcgtatcgacaaagccttctttgccgagtactttttctcgagc

SEQ ID NO: 6647 - DNA, 127 bp, Zea mays
gagttctaatggctgacagagagagaagtgagcacgcatagcttcgagcatgaactctctcgatcatacatcatgcaagaaaggcaccatgtgtgctcactctcttctgtcagctttcacctctcct

SEQ ID NO: 6648 - DNA, 99 bp, Zea mays
gtaccaagttctttgccgagtgtttttttcgggcactcggcaagaagcttcttttgccaagtgccacgcaaaaaacctctcggtaaaagaaaacacttc

SEQ ID NO: 6649 - DNA, 205 bp, Zea mays
aaatttacatctagaaacgaaggggaaaaataagttattctgatcggtgtcaagttgcataaaagaatattccacggaaatcaagagactcatctgacaaatgatatctgttgagagtttctaagacacttctaaaatctaaacattgactaaggcccctttggtagggcttatttttcagcttcggctctggctcatgcaaaag

SEQ ID NO: 6650 - DNA, 62 bp, Zea mays
cgcctatgccatgcggcggactgtgctcgttgtcccttcttcaagagtcttccccagcaagc

SEQ ID NO: 6651 - DNA, 72 bp, Zea mays
tgccgtgccggcacggcactagtgcctgaggctaggcccaagcacggcactaagcctgcttagccgtgccgt

SEQ ID NO: 6652 - DNA, 76 bp, Zea mays
tgtcgatgttccaggagtgctccaggtcctcgccgtttggcgttgtgagcctgtaagcgctggtggaagcttttgt

SEQ ID NO: 6653 - DNA, 141 bp, Zea mays
ccaaacagaccgtgcttgctaggcggtccgaaacatggcacaggtttggcccggcacgacacgtagtgaaccgggcccgtgccggtccggctcagtcaccgagccgtgcctggaccgaaggcgtggcacgaggggctaggc

SEQ ID NO: 6654 - DNA, 127 bp, Zea mays
  unsure (114): n = A, C, G or T
gcaggtgtgccggccaaaccacggcgacctagttcaattcaatggcacggtgagcttcacggggtgatgtagaggctatctgtgcattgaatcgaaaaatggtgcagtgatttncccagtccacgtg

SEQ ID NO: 6655 - DNA, 98 bp, Zea mays
tgggttaatttaagaacgtgggtaccaacgttcttaattgagttatgttcgtgggttaatttaagaacgtgggtacccacgttcttatgttaaattcg

SEQ ID NO: 6656 - DNA, 113 bp, Zea mays
ggtgtatggctcgacggcgggagtggccggaatcgtctggtccacgtgcgcaggcaggtgctctcgtcggcggcaggtattccggccaaaccacggcgatctagtccaatcca

SEQ ID NO: 6657 - DNA, 132 bp, Zea mays
gcgacctgcacacacctgatggcgttcgcagcctctcccttgctgccaaggatcatcacccacatatagcgggagagatcgtcgatgagcaacaagaagtagcgtcgtcctcctggtgtggctggtgtcacc

SEQ ID NO: 6658 - DNA, 106 bp, Zea mays
cgagtgtctaggtatgacactcggcaaagagggctttgccgagtgtctattacgtagcactcggcaaagaagcctctttgccgagtgccagccgttggctctcggt

SEQ ID NO: 6659 - DNA, 95 bp, Zea mays
taagcgagccgctaacttcctagagacggccgtaggaagttagcatgtgcagctaacttcctacggctgtctctagtaagttagcatgggcagct

SEQ ID NO: 6660 - DNA, 84 bp, Zea mays
agtgctagggccatagcactcggcaaagaaactttaccggtgcccaagtgttccttctttgccgagtgctatggccctaacact

SEQ ID NO: 6661 - DNA, 84 bp, Zea mays
agtgttagggccatagcactcggcaaagaaggaacacttgggcaccggtaaagtttctttgccgagtgctatggccctagcact

SEQ ID NO: 6662 - DNA, 134 bp, Zea mays
ttccattgtgcaagcaagattggtcggattagcccacttttccgtgggttatatattcacttatgcagctttcttgattgcctcaacatcaggcaagtttggttaatttagttatttttttttgtactgtatca

SEQ ID NO: 6663 - DNA, 175 bp, Zea mays
acactattaggtgagtgtccgtgcgttacaggcctgagtttctctttgatatcattccggatggcttgtggatattatcatccatctcataatcgtataacacatatttgtatatataagttatcgagatattatatgttccagatgcaatgcacgaacactgacctatcttata

SEQ ID NO: 6664 - DNA, 161 bp, Zea mays
ctctacttctcttggtccgttagatctagatccaagcatatatgtaatcgtggtttgttaggggcgtctttataaaactacacgaggtagtggtagaaggatttaaatgctaaatatggtatacggttagatctagatctaaccgaccaagagacatgctt

SEQ ID NO: 6665 - DNA, 92 bp, Zea mays
acgcggcctggtagctcggcgtcacagatctaggcgccgagctacgaaagctcggcgccacagatcttggcgccgagctgcgtctgccctat

SEQ ID NO: 6666 - DNA, 210 bp, Zea mays
taccggaatcgcgttcttttgccgagtgtctaagacttgacaaaggccattttacactcgacaaaagctttgccgagtgatacactcggcaaacaataatcggcaaaatatttggcactccgcaaaggctttactgagcttctttgccgagtactcgaaaaaacacttggcaaaatatttggcactcggcaaagaagcaaatttctggta

SEQ ID NO: 6667 - DNA, 189 bp, Zea mays
ctacgccacctgcgaaggccctgacgctgtgggagcctccgccgttggctccgccgttggttccgccgctgcctccgccgttgtttccgccgccaccgccgcgggatcttcagcactcggcacagcagctgcgggggcatcaggggcgccttcggccaccttcgggggcaggtcttcgctggccgcagc

SEQ ID NO: 6668 - DNA, 89 bp, Zea mays
ccgtcatcccgccgagatgccagcctaaggatgctcgcgtcccatcctccccgacatcctttgcgccgtcattctcgccaccgccgctc

SEQ ID NO: 6669 - DNA, 82 bp, Zea mays
gcgccagggccatcctgcagacggcgtgcatgtccagtcaattgtcaaacaatgcgctcgtgctgcggggtgcactgtgtcc

SEQ ID NO: 6670 - DNA, 75 bp, Zea mays
ggcatggcagtggcacgagcgtttcaggcaccttaacttcgaggccctgaagcggctcagtgacaaggagatggt

SEQ ID NO: 6671 - DNA, 82 bp, Zea mays
gtgtcagggccataacactcagcaaagaaccaatacctaggcactggtatagcttctttgccgagtgtggtggccctggcac

SEQ ID NO: 6672 - DNA, 93 bp, Zea mays
accgtgcctaccaattaaccgtgccgggcccgtgcctgcaccgcgagcccgacggccagcccaagcccggcacggctattggaccgggccggc

SEQ ID NO: 6673 - DNA, 147 bp, Zea mays
tcaggtatgtatggcctgtttggttcgtggctaattatgtcacactttgcctaaggttagtcgttcaaattgaagaactaattttaggcagaaaagttaggcaaaatatagcaaattaggcaacgagccaaacaggcatgtagtgtt

SEQ ID NO: 6674 - DNA, 84 bp, Zea mays
tcaaagagtggacgacgacgacgatgacgatgatgtttatgcaccgctgcgacaacgcctcgcacgtaatcgtcaggatgggag

SEQ ID NO: 6675 - DNA, 126 bp, Zea mays
gaaaatcttagtttatcagaagcttggtctaaaattcccgaaaaattagccttttatgattatattggtaataatccggcaaaggggggattattcagagcaggctcaatggacaatggggatggc

SEQ ID NO: 6676 - DNA, 187 bp, Zea mays
gaccaaggcgagagcaggctcggatgagtgactacacgcgccagaacttgggcagaacgcacgggcacacgtgttcgaccctggtcggcacgccagagctcgcccaacccgcgcgcgcgctcgccctggcgtccggtcaagtccgccgcgcgcccacgccctcggtcgtgcccgcccgcgcctataa

SEQ ID NO: 6677 - DNA, 95 bp, Zea mays
gttgagtgccacctgatactcggcaaagaaaagtcgtcgtcgcggctctaagtgacggttacagagcctttgccgagtgtcagttggactagcga

SEQ ID NO: 6678 - DNA, 74 bp, Zea mays
cgatttctaaccggattgtttctctaatttatataaattttgattagctggaacgattccggatgcaatccaac

SEQ ID NO: 6679 - DNA, 230 bp, Zea mays
ggtaaagacgttctttgccgagtgccagatatttaacactcggcaaagagtatgctttgccgagtgccggccttcggccctcggcaaaggctgacggccgtcagctgtagacgaccgctaacggccctttgccaagcgccatctttgcctagtgtttgccactcggcaaagcagtatttgccgagtgtttctctgtgccgagtgtcccgcactcggtaaacaagctcttt

SEQ ID NO: 6680 - DNA, 130 bp, Zea mays
tcggcaaagaggtgctttgccgagtgtcaggaccatagcactcgtcaaagaaccaagacctgggcaccggtataggttctttgccgagtgcagtggctttggcactcggcaaagaagctcgctttgccga

SEQ ID NO: 6681 - DNA, 122 bp, Zea mays
caaagcgagcttctttgccgagtgccaaagccactgcactcggcaaagaacctataccggtgcccaggtcttggttctttgacgagtgctatggtcctgacactcggcaaagcacctctttg

SEQ ID NO: 6682 - DNA, 231 bp, Zea mays
tgcacatagaagactggtgcacatgatgcacatattaaatcatcaccattcattttagatctaacgtctttagttgattgttcaatttataaataacacattccaccactacacaccaccacgttagagggtgtccttagtaaaatgtaccaaacaactaaagacgttagatctaaaataagtggttatgatttaatatgtgcaccatgtgcatcagtgtttcatgtgcac

SEQ ID NO: 6683 - DNA, 87 bp, Zea mays
agcggtatgtgggaccactttcgtctgtacgactgggccggagaccacgacatggttgatgctgcggtagtggtctcgcttctgccg

SEQ ID NO: 6684 - DNA, 167 bp, Zea mays
tccgtcagccgtccccgacgtggacgagccaacttcaaaggatctcattgacggagaccgagtcttcgccctacaggctctatatttataccaagcccagaccaaagcatggcgtgaccacacggtcatcccgagggagttcagcgaaggggacctcactccccccg

SEQ ID NO: 6685 - DNA, 149 bp, Zea mays
ctgccgcctgaggtcttgtttgtttgtgtcagattggtgggttggaacgattgctagccggattgcttctctaatttatatacactttgattagctggaacgattccgggtgcaatccgacacaaacgaacaaggcctgacttagactt

SEQ ID NO: 6686 - DNA, 103 bp, Zea mays
catctttggtagccagggatgatttgcctgtggttcctgtcgttgccatgccaatgcctgtactgttcgatctacgggcaaatcatccctgctaccggagtgt

SEQ ID NO: 6687 - DNA, 166 bp, Zea mays
caacccgaatgcaacccagggtgtttgaagctcctcacgaaaaggagaacatgtcccacctgtagatcccccggataacgttttagttgttgttgctgctgctgcgggtggggtgtattatccttttagtgaggggttgtaaacactttgatttgcattcaggctg

SEQ ID NO: 6688 - DNA, 148 bp, Zea mays
agtatagactaggtgagtgaccgtgcgttgcaacggaaacatatatcacgataatttataataatataactcatttgtacataagttatcatgataagatcctctctatggacataagcaacgcaaaggcactcatctagtacacaac

SEQ ID NO: 6689 - DNA, 91 bp, Zea mays
gtggcacgtacgtcggcgccgtagatcttgccaccgaggtatgcgccatggatctcggcgccaagatctacggcgccgaggtacgcaccta

SEQ ID NO: 6690 - DNA, 141 bp, Zea mays
gcaaaatagcttctttgccgagtgccaacgtctagcactcggcaaagttaacgaccgttagcttgagacagttgctgattaccctttgttgagcatcgccgttcgttgagtgtttgacactcagcaaagaggttattgccg

SEQ ID NO: 6691 - DNA, 140 bp, Zea mays
taacaaatcggcccacttgccctttttctcatcgaggagcatcttattgacagctggcatcagaagccatttgcgcgttccacaactccgttaagagctattacgatactgaggcgaaggcaagcttgcagcctgcagtc

SEQ ID NO: 6692 - DNA, 71 bp, Zea mays
atctactcctgggaagagctctgtgcacggttcacagcgaacttcgccagtgcttatcagcagcatggtgt

SEQ ID NO: 6693 - DNA, 222 bp, Zea mays
cacgacagacgaactaagtcgcagcgaggtcgacgacgagatagggattaaggccgagcgagccgagagggcgcgcaacgagcaagaaaaagactcgacgcgggagtttgacgcgcacgtgaagctatcaccagcgacaacacgacgatggcgatatgagcgaacgtgaatcggcgcgggccaaacaccgaacaaccatggcagcgacttgggtgagatcca

SEQ ID NO: 6694 - DNA, 85 bp, Zea mays
tacctcggcgccatagatcttggcgccgaggtacgcgcccgatcaacgacactacctcggcgccaagatctacggtgccgaggta

SEQ ID NO: 6695 - DNA, 150 bp, Zea mays
gtcgagtgcctcagacactcgacaaacgttttaccgagtgccgcactctgcaaagagatctagtaaaaaaatcatcggcgaaagattctttgtcgagtgctttctatcgggcactcggtaaagactttgccgagtgctgaatacatactc

SEQ ID NO: 6696 - DNA, 100 bp, Zea mays
ggctcaagcctcccacattcgctggatctagcaatcccctcatcttattattgtctatcacgattaaaaggaagttggaagccatcggatgccggagatc

SEQ ID NO: 6697 - DNA, 94 bp, Zea mays
gtggtatctcagccggatgtgcttgctccgttcatggaacacggggttcttggccaatgccagagcggaggggctgtccaccctgagttccacc

SEQ ID NO: 6698 - DNA, 71 bp, Zea mays
gtgccagatcggggacactcggcaaaggactcggcaaaggagcctttgccgagtgtcacctcggcgacact

SEQ ID NO: 6699 - DNA, 183 bp, Zea mays
cccggcacagtcagcaggtcgacatgacgtgtctgggcccagagttgtggtccgtgagcgtctggcccgtgccgggtcgccgtttggccatctataggcgtgcaacggatttaatttgaaatagctatgaggggttatttgtaaaaagatgacgcatgacgaccgttgaaaactggtgcttta

SEQ ID NO: 6700 - DNA, 157 bp, Zea mays
ggaggggcttaccggcggtgagattgctccggtgaagtggtcgagggtgtaggggaggtcttgacggtcaccccgatgtgcggatcgtctccggcgatggtcggattcggtcggtccacgcgtgcaggcgggcgagctcgtcggcggcgagggctcc

SEQ ID NO: 6701 - DNA, 113 bp, Zea mays
tggttctgccacagctggtatcggagcaaattccaccacagagaaggacaataaaccatgaacaccaattttcaaaatctaaaacttgcctagaaactgctatggaacgtcag

SEQ ID NO: 6702 - DNA, 98 bp, Zea mays
cggcggattccttcactatagggtcctcaaccttgtagatatctcgctcgaaatcctcatcagcctggtcgaagacctcatagtgtcggcatccttcg

SEQ ID NO: 6703 - DNA, 130 bp, Zea mays
  unsure (1): n = A, C, G or T
nctgggcgctaaacacgactgagtgcagggcgactgggttcacccctttccgccttctatatggatcggaggccatgaccccacaagaaataaaacatgggtccccgcgaacagttttgtcagctgtccc

SEQ ID NO: 6704 - DNA, 208 bp, Zea mays
cattatgtgtaagcgtgcaagtagctcttattggttcattagatctagatccaaccgtacgtgtaatcgtggtttgttaggggttttaggggctttttttataaagctacacgaggtgatgggagaaggatttaaattataaatatgacataaggttagatctagatctaatggatcaagagacctacttgcacgattgcacataatg

SEQ ID NO: 6705 - DNA, 75 bp, Zea mays
ggcgtcccacgtgtaagcgatagcggcgaggaaataggaacgcacgcccgcggaaatcgcgcacaggttggcgcg

SEQ ID NO: 6706 - DNA, 95 bp, Zea mays
caagcgagccgctaacttcctagaggcaaccgtaggaagttagcatggacagctaactttctacagccttctctaggaagttagcttttaattgc

SEQ ID NO: 6707 - DNA, 187 bp, Zea mays
gaccaaggcgagagcaggctcggatgagcaaccacacgcgccagaacttgggcagaacgcacgggcacacgtgttcgaccctggtcggcacgccagagctcgcccaacccccgcgcgtgctcaccccggcgtccggtcaagtccgccgcgcgcccacgccctcggccgtgcccgcccgcgcctataa

SEQ ID NO: 6708 - DNA, 90 bp, Zea mays
atgcgcctgcccctgcctattttcgagcgcccttctcttgtctgtacgaggctggctcgggcgagacggactgggcagaggcgacatctg

SEQ ID NO: 6709 - DNA, 241 bp, Zea mays
tggtggaggagttgcgcgccggcgactctgttgattttggtgtgtcacggatgacgtcagcccgcgttgaagatatgcagcggttgggctactttggcggcggagttgctcgtgctccggggacggaggaggtccccgagccggagggtgagttggtcgttttcgaggcgttcttcgccgccggtctccgcttgcctgcgcaccggtttgttggcgaagtcctgcgtagattcaacgttca

SEQ ID NO: 6710 - DNA, 83 bp, Zea mays
gagcatttaccgagtgtcctaccagacactcggcaaaggcttcctctttgtcgagtgtctgctggactaacgctaggcaaaga

SEQ ID NO: 6711 - DNA, 94 bp, Zea mays
acattgccttatgtccgacggcccgccacctagccgtcggacattagcttatgtccgacggcctcgtaccgagccgtcggacataaggcttttt

SEQ ID NO: 6712 - DNA, 117 bp, Zea mays
ggacggctggcgtgccgatggtgtgaaagaacacgtcggagggcaggggctcgcccctggcggcggccttggctaatgcatccgcctcctcgttcttggccctatccacatgctgca

SEQ ID NO: 6713 - DNA, 127 bp, Zea mays
gcaaagagttagcctttgccgagtgtccactgtactaacactcgacaaatatgctccacgtggaccccttttgcttgttcctttgccgagcgtattaggtggcactcggcaaaggcttcctctttgc

SEQ ID NO: 6714 - DNA, 74 bp, Zea mays
ttgtttatatgcattcatgtgcattatgcaaatcatttaggtacgtttgttgatcacgtgatgtagaaaacgac

SEQ ID NO: 6715 - DNA, 77 bp, Zea mays
ggtagcgagactcgacggtgaacggcgcgacgatgaactaagtcgtggcgaggttgacgacgagatagggattttaa

SEQ ID NO: 6716 - DNA, 78 bp, Zea mays
ctacggttctcacccaaatgaggcctgctggccacctttcaggtgaccaatcaggagcattttgggtggcctaatggg

SEQ ID NO: 6717 - DNA, 102 bp, Zea mays
agacctcatcgacggagacagcgtcttcgccctgcagaccctcgacaaataccaagctcaaacgaatgtctgttacgaccacgcagtcgtcccaagagaatt

SEQ ID NO: 6718 - DNA, 145 bp, Zea mays
taccggaattcggctttttgccgagtgttaaatgatttgccgagcgttttttttcgggcactcggcaaagaagctctttgcggagtgcccaaaagaaaacactcggcaaatcatttggcactcggcaaagagccgaattctggta

SEQ ID NO: 6719 - DNA, 128 bp, Zea mays
actgcaaactaaaatgtttgcagtccctcataaaaaggaagatagacatcacttagttgtgttattgcttctgcgggtgaaatctattctcctttttgtgagaggctgcaaacattttggtttgcaac

SEQ ID NO: 6720 - DNA, 125 bp, Zea mays
actatcccctaaacactgtgttgtgggtccacgagtaattgttagtagataaaaaattgatagttaatatagaaaatgatattttataattgtagtggggtataagggagtatttaggggaaccg

SEQ ID NO: 6721 - DNA, 172 bp, Zea mays
cgacccagcacgaccaaaaaatactcgggccagcacaacacgttacgtgggctgggccgtgcttcggttttcggcccgacggcccaagtagcccggcacgccatagtgggccgtgctcgggccagcccggcacgatttagggttagggttattttttggacgtctcacgcag

SEQ ID NO: 6722 - DNA, 116 bp, Zea mays
ctgctatgtccgacggctaagtaccgtcagagataacacagggccgtcggaaataatctatttccgacggtttcgagcttatgtccgacgactttggccgtcgaagatcctatgtt

SEQ ID NO: 6723 - DNA, 103 bp, Zea mays
agttcaaaatgtgggtacccacgttcttaaattaagttcatgggccctagccaaaatcgtcgaacttaactcattaggagcgtgggtacccacattcttaaag

SEQ ID NO: 6724 - DNA, 221 bp, Zea mays
cacacaattgtggcgcgtaacacaaccagtttggctatgttagctaggaccaactttggggatgtcgtagtgctcgctgaggtttgccagatattggttgaagtcctggatgcggtctctgtgcgacttgttggcgactttggccatcttctgcatgtcaatcttatgcttctgttccatgtagcatcgctctgctggtgtgagatggtcatagtcaggat

SEQ ID NO: 6725 - DNA, 143 bp, Zea mays
atctccattagcccttgttgatttgtgttggattgggtcggaacgattactaactgaattgcttctctaatttatataaactttgattagctgaaacaatttcggatacagtccgacgcaaacgaacaagaccttagggattg

SEQ ID NO: 6726 - DNA, 111 bp, Zea mays
ggtgagtgtccgtgcgttgcaacggaaccatataataacacgataacttatgtacatatgtgtgttatattgttataggtatgtgtccgtgtgttgcgatggaagtaaaaa

SEQ ID NO: 6727 - DNA, 238 bp, Zea mays
atttcccgagccgggacgtggcggcagacggcgacgttaggaagtccggagacgccggcgggggcctcgggaagagttatcttttctgcttaacggcccgccaaccctggaatcggttcagccggaggtagggtccagcgcccggaagagcaccgcccatctcgcggtgtccggtgcccccccggcggcccttgaaagtcccctggcccgaattccgtccacgcccggtactcttatt

SEQ ID NO: 6728 - DNA, 114 bp, Zea mays
gggaggatttagagtggttcaggccaccggagcgtaataccctactccactgtgtgttggattcttgaggaagcttgtgctgtgtgtaagcctgaatgaccttcgtccttgtct

SEQ ID NO: 6729 - DNA, 80 bp, Zea mays
agtgcctccctgcgcacttggcaaatgaactgccaaagggacccacttgagccttctttgccgagtgccagtccaacagg

SEQ ID NO: 6730 - DNA, 104 bp, Zea mays
atatcacgttgctggctccgtcttcacttgactcttggaatttcttgatgacgcacggatcgacgacgaccttcaattgaagtctggagcgagctggtgaggtg

SEQ ID NO: 6731 - DNA, 253 bp, Zea mays
cggacatcaagtactcaccaaactttttcagtattacactagacatagcactagataaggaagtcagagatgtctgcaagctatatatttgagtggtatactcactagacgtgtctggtgaggcatcaaatatagcactaaataccaatacagtaatgacttgtttctgaaataagtcattagagctatatcagacttatctagtgtagagagtaggtgtgcactggacatgtttggtgccgctatgaatgtt

SEQ ID NO: 6732 - DNA, 138 bp, Zea mays
cctagtgcatgtttggtttgtggctaaatatgtcacactttatttaaagttagtcgtctgaattgaagaactaacattagacagaaaagttatttctatatgtgataacttagaacacgaaaccaaacatgcctctaa

SEQ ID NO: 6733 - DNA, 146 bp, Zea mays
gacctcgtaaggcttttttcgtttgtgccggattggtgggtcggaacgattcctaaccggattgcttctctaatttatataaactttgattagctaacatgattccaggtgcaatccgacgcaaacgaacaatgcctaaggcttat

SEQ ID NO: 6734 - DNA, 169 bp, Zea mays
atttgaggaatgaacccatgatgcaccacctcaatttggatgtagtgattctttaaaccaaaacacccccctttaattccttaaaccaaacacactctaatggtgtgtttggtttgtggagtcactctattcttcatgaggtgatgcatcataagtttattccatcaat

SEQ ID NO: 6735 - DNA, 143 bp, Zea mays
aacatacatgtagggctagtttgggagccagaaaaccagagtagagtggattggagagaccaaaatctccttaatcaaaattgaataagaggcgattttagtccttccgatttttttggctcccaaactagccatgtatgttt

SEQ ID NO: 6736 - DNA, 174 bp, Zea mays
caagtggccaaagcactcggcaaagaaggcacacctgagaacaattaaaacttctttaccaagagttgtggtcccggcaagaagaacactttgccgattgcctcatagtgcactaggtaaagggactggtaaaggggtccactggtgcattctttgtcgagtgtcaggcaggca

SEQ ID NO: 6737 - DNA, 157 bp, Zea mays
tgttttttcgggcaatcagcaaagaagctctttaccgagtgccatgcaaaaaacccccggttaaaataaaacacacgacgaagaagctctttgccgagtgttttattttgataactcgggcaaagagcttctttgccgagtgtcaagagtgtcaaaa

SEQ ID NO: 6738 - DNA, 109 bp, Zea mays
gagctcttcaaaacaggaccttgggtcttagttcagtgatgcagaaataaattggctgagcgagtgccaatcgaagcatgatactgtacctgcaggacctgacagcagg

SEQ ID NO: 6739 - DNA, 218 bp, Zea mays
aacgcttcgagtggtcctgcgcgggcgggtgccttggtggtgtactggtgtgtccccgtagccgtaccgtggcacgccggatactctagcaagtgctcgcaacggcgtccttgtccgtcagttaaggctaggaccaggccgtacctgagagggtgcagtggtatcggagtataggtatacactaggtatgtgcccgtgcgttgctacggtttctataa

SEQ ID NO: 6740 - DNA, 225 bp, Zea mays
tccgacggctgaggcaaggccgtcggacataagtgaagtgggtctcacccgcgaccgttaaaacggttaccacgccttatgtccgacgggtggttgtggccatcggacatactgctatttccgacctgctatgtccgacggccatataccgtcggagatagcccgacgccgtcggacataagatatctcacggcttatgtccgacggctttgtccgtcggaattt

SEQ ID NO: 6741 - DNA, 78 bp, Zea mays
atttatggtcgtttcggcctaggtcttagctaatttctaggtccgccactcagaaggttacaatagggcaatgggccg

SEQ ID NO: 6742 - DNA, 216 bp, Zea mays
cttgcaaggtaaacctaaacacacgacgtggcgaggcactccgtcctgacacatatcaatcgtccccatcgattccccgtcaacagaacagggctcaccgcctaggcgtacaatgcctcactgaccccgactgccgtcgtgcagtgaccgcacttgtacccaccataaccggaatgggagaccacgtctcacgtcgtgtgaggggtaaagtctact

SEQ ID NO: 6743 - DNA, 92 bp, Zea mays
tggaaaaaaaacacttgggaaagagctctttgccgagtgttgtatttgtgacactcaccaacgacctctttgccgagtgtccaaaataaaaa

SEQ ID NO: 6744 - DNA, 82 bp, Zea mays
aaccaccactggggccgtttcaatcgctttctaccatagacttctctagtcaaaaccggttgaaccgcccctagagccaatt

SEQ ID NO: 6745 - DNA, 113 bp, Zea mays
cagtccctcacaaaaatgaggataggccccacctgcaagttcaccagataacatttttgttgtattattgacctgcaggtggggtctatcctcatttttgtgaggggctgcaa

SEQ ID NO: 6746 - DNA, 84 bp, Zea mays
cgtcatcattgacgccgaggtaacacatagtggcgccaacataattggcgccactatgtttttatcttggcgtccatgaaggac

SEQ ID NO: 6747 - DNA, 188 bp, Zea mays
gaccaaggcgagagcaggctcggatgagtgtctatacgcgccagagcttgggcagaacgcacgatttttttgtgttcgaccctagtcggcacgccagagctcgcccaacccgcgcgcgcgctcgccccggcgtccggtcaagtccgccgcgtgcccacgccctcggccgtgcccgcccgcgcctataa

SEQ ID NO: 6748 - DNA, 81 bp, Zea mays
ccttccaatagacttcacttcaagttccacaatctataaaagatcatcttgtagtgcttctgagtagagtcttctgataga

SEQ ID NO: 6749 - DNA, 159 bp, Zea mays
cacgctgcccctgcggctactgtgtccggtggtggctcgtcgccaaccgttgtgccgagggtggaggatcccccgaaggcggcgacggagccggcagcggaggatcccatggcggcggctgggtcttcgcaggtggcttagtgggtgtggggtagttag

SEQ ID NO: 6750 - DNA, 126 bp, Zea mays
gcgcaccgatttgttggagaagtcctgcgcagatataacgttcagatccatcagttgactccgaatgtcgtggtggctctgtcgaagtatgtctaggcgacgacttcgtacggcgaacagccatca

SEQ ID NO: 6751 - DNA, 168 bp, Zea mays
aagttaagcgtgcttggcttggagcaatatgggatgagtgaccgaccaggaagttttctctcgggtgcgcatgagtgaggataaagtgtgcacaaaatactcgtgttggtctgtggggacgatatatgatcctagaaagctgccaggagtaagtatcaccagtccagg

SEQ ID NO: 6752 - DNA, 156 bp, Zea mays
cactcaccaagtcatggatgagaggagagagtgcggagagccacacgcgcgcgcgctcgctcgcctcgcctggcctggccggacgaagggcgcgggcgcacgacatgcgcgtaaatggtccaccgaaatccggcccctcgccatgcgggggcgtga

SEQ ID NO: 6753 - DNA, 93 bp, Zea mays
cagtacaacatgtgcagtactagtcaatgacgtgttggcctagtggagggcaggtccacacgtcagtgactggtactgcacgggcagtactgc

SEQ ID NO: 6754 - DNA, 164 bp, Zea mays
agattatagggcagcccactacggtgtagtatatttgagtcacttgagacggtactctatagttttttgacaaaattttatgaaatatggcactgttggagtaatttttcctgtgtagagtcctatatttcaatttaaggcactagtttgaggcattgttggag

SEQ ID NO: 6755 - DNA, 186 bp, Zea mays
gacctggtccggctcgaccggattgcaccgttcgacctgggcttcctctagttattggaagcccagggctcttaatatataaactatatatatatatatattgattgtatattacaaggcatggacttctaataactagagtaagccctgactcaatggtaccgtccggttcaatcgaaccaagtt

SEQ ID NO: 6756 - DNA, 171 bp, Zea mays
gtccaagcctgccacgctacagttgataaccatggcgtcgatgtggggggcgctgcgcagatcgacgtctcgggcgtcgaaggttatcggcagatgggaccacttcgtctgtatgaccagaccggtgttggcgacgtggttgatgctgcggtagtggtcacgcttctcccg

SEQ ID NO: 6757 - DNA, 194 bp, Zea mays
ccgagcgccatctttgccgagtgcttgccgctcggcaaagcagtctttgccgagtgttcctctgtgccgagtgtcccgcactcggtaaataagctctttatcgagcgcaggactttgccgagtgcggctctcggcaaaatcttcttttgccgagtgcccgataaaaagcactcggcaaagatcttggcactcgg

SEQ ID NO: 6758 - DNA, 148 bp, Zea mays
gagccgacttaggccttgttcgtttgtgttggattgcacctgaaattattccacctaatcaaagtttatataaattagagaaacaatccggttaggaatcgttccgacccaccaattcgacagaaacgaataagaccttaaggtagga

SEQ ID NO: 6759 - DNA, 213 bp, Zea mays
ttctgcacgtgtgctggtcaagtcaccgtccagcgtggaagggaatgccgaaagacctcctgcccctccttatccattcaggtacgcgtgggctcaacaccattcttctccaccagaatgttgtggccacacatgcctaaatggatacaacagggacagagaggtattttggcattccccctgagggtgacttggccagacatgcatgcaaaa

SEQ ID NO: 6760 - DNA, 79 bp, Zea mays
ggaagcccaggccgactactcctacaaattggttcaagcaaagcgcccaaccagcctgtcgggtgcgtcacctgcccca

SEQ ID NO: 6761 - DNA, 123 bp, Zea mays
cagttccgccacagctggtatcggagcttgtaccaccatagaggaatcaataaaatgtaaataccatcaattttctaaataaaacttgatagaaacaaggttggatagatagtaggacgagca

SEQ ID NO: 6762 - DNA, 77 bp, Zea mays
aagggaacgggctgggcagaatcagcgggaaaagaagacccctgttgagcttgactctagtccgactttgtgaaatg

SEQ ID NO: 6763 - DNA, 78 bp, Zea mays
tagcacaagttacgaccgatttcaggagcggaccggaagcttttccacgggttgcttcggcattggttcatccttctc

SEQ ID NO: 6764 - DNA, 183 bp, Zea mays
gtgcggcgcgagagcaggctcggatgagagaccacatgcgccagaacttgggcaggacgcccgggcacacgtgttcgaccctggtcggcacgctggcgctcgcccaacccgcgcgcgctcgccccagcgttcagtcaagtctgtcgcgcccttgccctcaaccgtgctcgcctgcgcctataa

SEQ ID NO: 6765 - DNA, 83 bp, Zea mays
tatggttttgggtcaagtagactcggtctttgagcacccgtcatgctgcagctcgaggacgagctgcttgtccaggaggggta

SEQ ID NO: 6766 - DNA, 253 bp, Zea mays
cggaaatcagctctgcagatctcccgaagactgctccttcacattagctcgtgaaaatacttttgttttgtgtttatacctcgctaaggctggttgttactagtataaataccccctatttctatgatgtaaggcagcttatgataatctaaaatagaacccctttgttcagttgtgtgtttacaaatattgagagtgatctctacccctttgctcttgtgaattccttcgcgggattgcagaagcggcgtct

SEQ ID NO: 6767 - DNA, 258 bp, Zea mays
cggcacatctgttaaaagataacgcacgtgttctaagatgagctcaacgagaacagaaatctcgtgtggaacaaaagggtaaaagctcgtttgattctgattttctgtatgtattacgaactcgtgaaagcgtggtctatcgattctttagatctttcggagtttgaagctagaggtgtcagaaaagttatcacagggataactggcttgtggcagctcagcgttcatagcgacgttgctttttgattctttcgatgt

SEQ ID NO: 6768 - DNA, 80 bp, Zea mays
tttcaccgagcttgactctagcgtccgaggctccgtcaagtttggggatgcctccggcgtagagatcaagggcgtcggta

SEQ ID NO: 6769 - DNA, 157 bp, Zea mays
tctgagtatcgagtgacactcagtaaagtttttgccgagtgtctgataaaaaatattcgacaaagaaaccgttgtcgatatgcaatttcaccgagctttttttgtcgagtgtcacactcggcaaatacttcgccgagtgtttttcagacttttacaa

SEQ ID NO: 6770 - DNA, 193 bp, Zea mays
gggttacatcggcggcggagttgctcgagtcccggggacggaggaagtccctgagccggagggcgagttggttgttttcgaggcgttcttcgcgccggactccgcttgcctgcgcaccgatttgttggcgaagtcatgcgcaagttcaacgttcaaatacatcagctgacaccgaatgccatagtggctctgt

SEQ ID NO: 6771 - DNA, 222 bp, Zea mays
gagtgtcgtcctttgccgagtgtctgcgatctggcactcggcaaagatttttttaaaatattaaaatattctttgtcgagagtgtcctttgccgagtgccagctggatgacactcggcaaagaatcttttataatcctttgtcgagtgtctccctgctggcactcggcaaagcatgcttttttgccgagtgtcatttgtggacactcggcaaattatttttt

SEQ ID NO: 6772 - DNA, 106 bp, Zea mays
cgagagtgtcctttgccgagtgccagctggatgacactcggcaaagaatcttttataatcctttgtcgagtgtctccctgctggcactcggcaaagcatgcttttt

SEQ ID NO: 6773 - DNA, 106 bp, Zea mays
aaaaagcatgctttgccgagtgccagcagggagacactcgacaaaggattataaaagattctttgccgagtgtcatccagctggcactcggcaaaggacactctcg

SEQ ID NO: 6774 - DNA, 111 bp, Zea mays
aacttcagcctctcctccatgggagtgtaagctaggttgcagtcggtgagcctgcccaactcattgatgcgcttggcgtaggcggtctggcgaagtgagacgctggagctg

SEQ ID NO: 6775 - DNA, 132 bp, Zea mays
atgcctagtcccctacctggcgcgccaaatgtcggagagcaaatccccggccgggtggcggagtgcacccaccctaaatcctaagatgaggaggggcctagatgttttgcttgttagttgggaaagtgggaa

SEQ ID NO: 6776 - DNA, 172 bp, Zea mays
gcgcaagataaacaaatggatggccgagccagcactggcactacgtgcgtgctccttgtacacgtgggaccgcgcaccatgggtggagtctggagtggagtttgtgcttccacgtacgctcggtatatgtgtatagatatttagtcggttgtccgtgcgttgcaacggctta

SEQ ID NO: 6777 - DNA, 156 bp, Zea mays
ttttataagcctaaggccttgttcgtttccatcggattgctttttttttcgttccagctaatcaaagtttatataaattagagaagcaatccagttaggaatcgttccgacccaccaatccagcagaaacgaacaaggcctaagcattataaaaaa

SEQ ID NO: 6778 - DNA, 80 bp, Zea mays
agacacgccgatcaggctgcgttggtaatcagctgagtaatgacattagctgaatattgactgcgccctggcaacacgac

SEQ ID NO: 6779 - DNA, 70 bp, Zea mays
ttgttcctacactcacactgttgttgatcaaatcattttttctcgaacacgcaggagagttgtgtatcat

SEQ ID NO: 6780 - DNA, 72 bp, Zea mays
atccccgtcgagcaagtctgcgaggcgtggcgaccgaccaagtccccgtcgagcaaatctgcgagaaggggc

SEQ ID NO: 6781 - DNA, 187 bp, Zea mays
gacgtcagtgctcccatgcgtaaaatgcattcaacccatccgttcaatattcaacggtgtaccgggttttttaatgaacaacactaacgtgaggagcgtgagaagacttatttacaaaaatgttataataccgttggatacaaaacggatcggctggatgcattttgcgcatgggagcacctgttat

SEQ ID NO: 6782 - DNA, 78 bp, Zea mays
catcagctgacgccgaatgccgtggtggccctgtcgaagtatgtctgggcgacgacttcgtacggcggacagccatcg

SEQ ID NO: 6783 - DNA, 75 bp, Zea mays
taggtatatgcccgtgcgttgcaacggagacatataatacataagtccccgttgcaacgcatgggcactcaccta

SEQ ID NO: 6784 - DNA, 146 bp, Zea mays
cttcgcacgacctcgtgactcgatttgcggcgcagattatatttttgccaatagaaaccttgacggatcaccttggcagcaagggccttgggcctcgagtgagagccgcaagtgccgctgtggacttcgcgcaggatctggaggcc

SEQ ID NO: 6785 - DNA, 93 bp, Zea mays
cggcccggcccaagcccgaaaaggcccgtattgtttgaatttcgggccggcccgacccgtttgaatttcgggccgtgtcgggccggcccatgg

SEQ ID NO: 6786 - DNA, 202 bp, Zea mays
tctattactactacggccctgtttggcacagcttattttcagcttcttcacaaatttaagcagaagttctgccaaacagctagcttctgcagcagcttatcagttcagctgcttctcagaatacactaaaagcagccaacaagcagaagctgctttttcaacaagcatcagctgtgccaaacagggcctacgtgtgagtctt

SEQ ID NO: 6787 - DNA, 118 bp, Zea mays
ttgaattgtctctcgagacttcggatggacgcgaggtattgcataagtgcggggtcctttgttgcatagtctttctcgacttggctggcgactaccttggaagtcttgttctgacaat

SEQ ID NO: 6788 - DNA, 115 bp, Zea mays
atgtgaatgactccgcgatacggctgatcagcaaagtcttcctgttttggtgcttgggggtgatttgagtggtggatgtttggctgatgcgggtgtggaggcggaagtgggggtg

SEQ ID NO: 6789 - DNA, 222 bp, Zea mays
cagtggagtagggtgttacgctccggcggcccgaaccactctaaatccttgtgtgttcttgtgttcttcccgttttcccgactaacaagcaaaacacttaggcccctcctcatcttaggatttagggcgtttgcactccgccacccggccagggatttgctctccgacaaggcggtatcaaagctgttaggttggctgcaggatgtaacccttagtccgatc

SEQ ID NO: 6790 - DNA, 165 bp, Zea mays
aaatgtcattggtttgaccctcaagtgacgagacggacacattctaatcttgggatagtcgaaattcgataggatttcaccttagcaggagacgatgtctatatcgtggcccaacaggccacacaagtgtattatctcccatatgcgtgtcaaacgaaagaacat

SEQ ID NO: 6791 - DNA, 98 bp, Zea mays
cttcatcataggcgccttcaggtttctacgtggaacttttctagatttgcatgaacctccgcaacctagggcctgattggttgccgtatctagcagca

SEQ ID NO: 6792 - DNA, 77 bp, Zea mays
ggtttttgaaatgtgaccgttgatggacgtgttactgttggactgcatgtttctcgaggtgtcgcgtcgcgcctata

SEQ ID NO: 6793 - DNA, 142 bp, Zea mays
catatatgtgctacctagttacaaaggaagaaaactgaattccccagctttgcttttatgggaagaacttacagaggtgctctatgttctagggattgggcagaggctctccttcagttgtggcaaggcggacacacccggg

SEQ ID NO: 6794 - DNA, 84 bp, Zea mays
agtgtcatgaccatagcactcggcaaaggatgcacaactagactctgggaaactttctttgccgcatgctatagtcaatgtact

SEQ ID NO: 6795 - DNA, 95 bp, Zea mays
gggcggttgcaaagcgtagggttagtgcggaggagggggctcggcttcgagtgagtagggctgatcggcaggaactgttgtctttgccggccgcc

SEQ ID NO: 6796 - DNA, 79 bp, Zea mays
tttggtttggtgggcgcagtcttcgccgtgaaaaaggcagtagaaccggcgcggcggctgctgcgctcgccctcgaccc

SEQ ID NO: 6797 - DNA, 215 bp, Zea mays
atactgaaggctgcgcagaagtcaaacaaccacacagaaattagctctgtagatctcccgaagaggctccttcacatcagcacgtgaaaatacttttgtttcgtgtttatacctcgctaaggctgattgttactagtataaatacccccttaagtatgatgtaaggcagctttggataatctaaaagttgtgcggctttgttcagctgtgtgcta

SEQ ID NO: 6798 - DNA, 102 bp, Zea mays
ttgagtgttttttggcactaggcaaaaaaagtttctttgtcgagtgttttgttcccgacattaagcaaagagcttctttgccgagtgtcaaaaaacacttga

SEQ ID NO: 6799 - DNA, 136 bp, Zea mays
ccagtaaaaatctttgtgggatcaccttagcagctagggcccttggccctgcgtgtgagccgcacgtgccactgtggacttcgcgtaggatctggatgccttcggtttcggtgacgcacttaagcattggctgact

SEQ ID NO: 6800 - DNA, 137 bp, Zea mays
ttctccctcttagggctagtttgggagccccatttttccaagagatttctattttcccaagggaaattagttcattttccctttgaaaataggaatcccttgggaaaatggagttgccaaactagctgaaagggaaa

SEQ ID NO: 6801 - DNA, 74 bp, Zea mays
acacaaatgaaaaacgtctatggatgcagatataagctacgagcataaatgcatgcatatgcgtagccgactat

SEQ ID NO: 6802 - DNA, 80 bp, Zea mays
agtgtcagacgtggaacagtcgacaaagatttgtttaaaaccctaaatccagtctttgccgagtgcccattgacaagcac

SEQ ID NO: 6803 - DNA, 226 bp, Zea mays
tcacggaagctttctttgccgagtgccaccaagcgaggaactcggacactcagcaaaggctctatcatcgtcacaatgtcttttctttgtcgtgtaccagttggcactcggtaaagacgttactgagtgcctgatagaaagtactcggcaaagagaccgttgccgacgtttggttcactaagggctatttgctgccttttggacttgacaaagaaaccgtctccag

SEQ ID NO: 6804 - DNA, 152 bp, Zea mays
caaaatattcatggcttgttggctcgctcgatttatggtcagctcgactcgactcggattgtctcgtttgatttttcaccagctaagctaacgttctaatttggtttattaacgagccagctcgcgagctaaacgagctatcacatttcagc

SEQ ID NO: 6805 - DNA, 223 bp, Zea mays
ttaagggataactaggtattaacaggtagcacaaactatctagatttcagacatcaccacatcggcaagcactcatccatgaaccatgatccattcatctatccatcagaaaagaaataagtacttcgagacggatagaagaaatggagaaatggagtttgctcaccttccttggtcaccatctgagtttgttggcgcctgagaatccatggtcgtcaccgtc

SEQ ID NO: 6806 - DNA, 146 bp, Zea mays
cctcctcagcgctgatttggtgaccagaaaaataaaagagatccatgtgagaggaatcctcttcctaatcaaaattgaataggaaggggattcctcgtctatggattctcttcatttccttggtcatcaaaccagtcctcaatctt

SEQ ID NO: 6807 - DNA, 107 bp, Zea mays
accggaatccggacctttgccgagtgccagtctctttgtcgagtgttccgacagacactcggcaaaggtaaatcctgtgacactcggcaaagacgccgtctccgtca

SEQ ID NO: 6808 - DNA, 68 bp, Zea mays
tttggacgatccattgcgacggcgcatggtgccatgcgggggcaggtgccgctgcagtcatcacctca

SEQ ID NO: 6809 - DNA, 135 bp, Zea mays
ggcactcggcaaagtctttgctgagtgctcgataaaaagtactcgtcaaagaagtcgttgtcgatgtactattcgtcgagctttctgtgccgagtgtgacgctcggcaaagactttgccgagtgctttagtcact

SEQ ID NO: 6810 - DNA, 94 bp, Zea mays
gcttgttaatcgtgctaaacgggccgtgcccttatcgtgccgggcctggccatgccagtgccgggtcgggccacccgtttggccatctataggt

SEQ ID NO: 6811 - DNA, 169 bp, Zea mays
caatccttcttccaacggagcagctaaatggaccaggcaaaatggaaggcagcggagagaaaagccatattatctggtactgtgatcgacaactaaattcttcattcttgactgaccactacgctccggcatctactccattgcagctgaacgtatggatgactgtgct

SEQ ID NO: 6812 - DNA, 185 bp, Zea mays
ttatataaaaaaccgcttgtgatgtgtggctaacacaagcggctaggataagaaaccgcctgtgatgtgtgtctatcacaggcggttcctttgaactggaccgcctgtaatgtgtgtctttcacaggcggtttttgattgaccgcctgtgatgttgtataacatcacaagcggttcctggaacat

SEQ ID NO: 6813 - DNA, 257 bp, Zea mays
ctcccgcaccaccaaaacgaccggatgtgagcgttttcccggacatgagcgccctgcttcttctcctcccctctacacttatatgactctccaactaaacaaagaacgaaacggctccgttgtattttactcttcaaccaaatagaacagagtcgctccaattttttgtttggttgaattttggttggagagtcatataagtgtagagggtagaagagtgaggagagcgatcgcatcaggtcgttttttagagcgaa

SEQ ID NO: 6814 - DNA, 93 bp, Zea mays
cctaaaatccaacctgttgataattatggatatgtaatattacatttgtgttgtataacaaatccgttgtagtctagctagttaggatattcg

SEQ ID NO: 6815 - DNA, 253 bp, Zea mays
gctcgcagtcgctacgttgccgagtatctggccgcatcttcgtggttgtgttctttcgcgggttttagttgttggtcaagcacgcccctgtttcctttgtcttgtcatcgtcgttcggtcacttgcctcgatgccggttcctgcgtgtcgtctccaacttatgttcacgccgacaaaagcctcccaagaagatgtggagaagcaatcccctagtcgatagcccaagtgctcggcgaaaggctagaacaagaat

SEQ ID NO: 6816 - DNA, 120 bp, Zea mays
aacatacccaggccttgcttaggcaggggtccggtgccgacatgtgtccaggcccagcctggtgcggacctgtccacataacgctactgctccccgctcaggcggaggcccgatgctacc

SEQ ID NO: 6817 - DNA, 123 bp, Zea mays
taattgagtgcccgtgcgttgcaacgagaacatatatcataataacttatgtacaaaaatgggttatactgttataagttatcgtgatatatatttccgttgcaacgcacgagcactcaccta

SEQ ID NO: 6818 - DNA, 202 bp, Zea mays
attgggtattctgggccaagcccattccagcccggcccatttggcccatgagagaaccctaaccctagtgccccttctataaatatgaacccctctccccttgcaaattttccaatttgcaaggggaggcacttctatttatagaggagtcctatggttagggttccaaatgggctgggttgggctagcccaaaacacgtaa

SEQ ID NO: 6819 - DNA, 204 bp, Zea mays
ttaatactagctagatgcccgtgcgttgcaactggaatatataatatcagtatactacgataacttatatacaaaatctgtgttatattgttatgagaaaatgtttcataatcaatttgtgatcctagccatacataaattttgttattttaatctagttatttcaccactatattgcaaccatcagtattatgcagacttcga

SEQ ID NO: 6820 - DNA, 110 bp, Zea mays
aaacaagcaaaactccattatgatgcacaatttagtggcgtcctttgttagtcatttatttgtttactaggtatatacccgtgcgttgctacggagttaacattgttata

SEQ ID NO: 6821 - DNA, 259 bp, Zea mays
gttcaatgtagcgagcgtagttcagtggtaaaacatctccttgccaaggagaagatacgggttcgattcccgtcgctcgccagcttaatttagtaaggtgctatgataaaaaattcagtctagttgactacttaactacttaatattatagtttatatttaatattatagtttatattatagtaaattatatatatttatttttaatatagtaaattattatagtaagtgactacttaactacttcgattaaatgacta

SEQ ID NO: 6822 - DNA, 79 bp, Zea mays
agaggccagagtccccaaccctatatcatgtgtctcgtgtgttcctctgccgtgcttatgggaagggagacggatcttg

SEQ ID NO: 6823 - DNA, 213 bp, Zea mays
aaccaaggaaccgaaccgaaccgaagaaccgaatgcccaggcctgcaaacaacaacaagtgcacaatgactataatttcatagataatacatggatgattagaggttcaacataagtcaataacacaacatccgaagttacaaacacatgtaacaaattgaatctaatacttttgggtttttcggttctttcggttctttcggttctttggag

SEQ ID NO: 6824 - DNA, 229 bp, Zea mays
gttctatctagtttgtgtgtttggtacaaaggaactagaacggaatgactccaattagggaatatctcctcagatccggaaccattccgctctaaaaaatcaaccggacggagccgctccgttccaatcccgctcgcacagtcacgctccattccgtttactctgcaaccaaacaaaaaacagagccgctccgttccagattaccaaacacagaacatagcggcttcgt

SEQ ID NO: 6825 - DNA, 212 bp, Zea mays
gaacagaaataagggtgcgtttggttgtggaacagtcaggacaggagcgtcccctggcgtcctctctcgtccctccaattttgagggataactgagacaacactgggatagtcctgtcccaacccttgacactgaaccaaacaaccttattgagggatcatctcatcctgtcccgtcctgtcactgcaaccaaacacatcctaatagtattg

SEQ ID NO: 6826 - DNA, 177 bp, Zea mays
gacggctttaagccgtcggagataactcgtcggaaatagtgctatgtccgacggcagacgtcggacataagttatctccgacggctgcctatgcccgtcggagataacaaatcccaaccgttttaccggtcggaatgtgggacccactgaattaagtccgacggctcccgctaggcc

SEQ ID NO: 6827 - DNA, 82 bp, Zea mays
gacgatgggccgacgagaggaaggaggacgcactgacgaggacccacaaaccggagccccgcctcactctgtagcccttagt

SEQ ID NO: 6828 - DNA, 175 bp, Zea mays
ggtcctcgccgtttggcgttgtgagcttgtaagcgctgggggaagctttcgtcttgactataaaggggccctcccacttgggctccagcttgcccttagactccgtccgagctgttcggacgagtacgagatccccctcgctgaactccctcgggatgactgtgtggtcgcgcca

SEQ ID NO: 6829 - DNA, 125 bp, Zea mays
catggggtgcttctttgccgagtgccacggtggcaattgacaaagtctccaatgtcgtcacctgacattgtgacgacgacttttctttatcgagagccatgtggcacacggcaaactctttgtca

SEQ ID NO: 6830 - DNA, 94 bp, Zea mays
caagtgagccgctaacttcctagaggcgaccataggaagttagcacgtgcagctaacttcttaagtcctcaataggaagttagtatttagttga

SEQ ID NO: 6831 - DNA, 180 bp, Zea mays
cttgtctgttcgccgcgccgggccgccacgatggggtgcccacgcaggagctgcacgcctgcgccggagccgcgccggggtcgtgcccgtgccagggtcgattcgggcgagaggcgaggtggggagaggaaaatggtgagctccttgcgacgtggtcgcccgagggtgaggagggacggt

SEQ ID NO: 6832 - DNA, 86 bp, Zea mays
ggacccaatactcggcgccataggatgtggcgccggggtaacacatctcggcgccacagcctatggcgccgagctgtgacgtggca

SEQ ID NO: 6833 - DNA, 108 bp, Zea mays
gtgcccgtcttacggcttctgaggccttctgtggcagaaccacccgagtgagagacccacatgcacctgtcctgtctcaaagacctcagacagctatgcatggcacca

SEQ ID NO: 6834 - DNA, 203 bp, Zea mays
ggctataggtgtacattcgggccgcccggtccggcccggcccaagcccaaaaaggcccgtaatgtttgaatttcggtttgtttccgacccgtttgaatttcgggccgtgccgggccggcccatgggcctagcccacggcccgacccgtaattgcttaaacgtgccgggctcatttcgggcggcccgaaattataaaagcccga

SEQ ID NO: 6835 - DNA, 94 bp, Zea mays
ggcaaagggttctttgccgaatactttttttcggacactcggcaaagactttgctgagtatcaaaaagcactcggcaaagaaaagccctcggca

SEQ ID NO: 6836 - DNA, 253 bp, Zea mays
cccagccaaaagtcatcagtactcaccatgttgcgcgcgttcgatgactactatatcatggactgtagcgtcatctcggcgccggaggtgacgcagaggaggaccgacagcaatgatcagttcgtcatccttcccaccatcggggtagctttttgtgctggtctgcatttaattctcttcgcaaacacacacacttgcttttttgtttgagcaagcgtgtatggtggtgtgtgcctgatgactgcgatgtatg

SEQ ID NO: 6837 - DNA, 219 bp, Zea mays
atattttcttgtgtcctccgccactgatccacgctgtgatcgggggcacccaaccctatatggttggtggccccctatgacactgcactataagtaaagggtgggggccggttggtctagatgacatagttcgctagagtcatattccccaccgacaaaccctagcaccgatctgagagggtgcacaaccagtgacgggaagacactgtcgttcttcgc

SEQ ID NO: 6838 - DNA, 179 bp, Zea mays
ccggtggcaagatggacggccaagtcactctagcaaccatgtcctccagagaacctgtaaaattatgccacaagcaaggtgagtatactatactcagctagactacccggtgtgaggagtctactcctctacctctagacatgctgctgttgctgtgggttggttgccaaacactagct

SEQ ID NO: 6839 - DNA, 72 bp, Zea mays
gctgacctcgcactcgacaaagaaggctccagtgggccctttggcagtccctttgccgagtgcgctgggagg

SEQ ID NO: 6840 - DNA, 95 bp, Zea mays
ttcctttttttgcgctaacagacgtggagcaggtggcgcacccgatagtctggttgggcgcgctggttgaaccagtttgcaggcgaagtcggcct

SEQ ID NO: 6841 - DNA, 105 bp, Zea mays
tacgtccgggggctagaaaccatcggacataagccgataccgtcggacatagcttaagttcgacggcttaaggcttatgtccgacggctttggccgtcggaagtt

SEQ ID NO: 6842 - DNA, 127 bp, Zea mays
gtacaagtgcggccactgcacgacggcagtcggggtcagtggattttttgtatgccaaggcggtgaggcctggacgcgaacggggaatcgatggggacgattgtcatgtgtggggtctgtgtatctt

SEQ ID NO: 6843 - DNA, 161 bp, Zea mays
cggcaaagtagtctttgccgagtgcttcgttgtgccgagtgtcctgcactcggtaaacaagctctttaccgaaggcaggactttgtcgagtgcggcgctcggtaaagtcttctttgtcgagagcccgataaaaagcactcggcaaagccaccggcactcag

SEQ ID NO: 6844 - DNA, 199 bp, Zea mays
caacaagaccctctaaagggtcctgtaccctaaatttagaggacggtcagcaacgtcttctaaacggtcctctaaatttagagaatccagcagcgtcctctaaatttagaggaccgtttagaggacgctgctggagggcgtagaggaccattcgatcctctatatttagggtacagaaccctttagggtcccttgttgg

SEQ ID NO: 6845 - DNA, 95 bp, Zea mays
cggtcagcaacgtcttctaaacggtcctctaaatttagagaatccagcagcgtcctctaaatttagaggaccgtttagaggacgctgctggaggg

SEQ ID NO: 6846 - DNA, 207 bp, Zea mays
tccggtatccgttccccgttttccaagccagaatctccgtatatttgcacttccgcaatgccagttttatggacaagctggggcccccggcgaagcagccggcgagcggcatgcagtccttgtgcgggagaggagaagagaaacccgtggaaaagaggagtgcaggtacacggcgtgtgttttgcggagacggatgcggaggctgct

SEQ ID NO: 6847 - DNA, 172 bp, Zea mays
gatcaccgagcaggggagcaagccagattgcctgagttgaagtggtggaggccgctatgtattcggcctcgcagctggacatggccaccacctgttgcttgatcgattgccaactgatggagcttttttccgagtaagaagaggatcccgcttgtgctcttgctggtgtcga

SEQ ID NO: 6848 - DNA, 132 bp, Zea mays
actggcactcggcaaagtctttgctgagtgcccgataaaaagtacttggcaaagaagtcgttgccgatgtactattcgtcgagctttctttgccgagtgtcacactcggcaaagactttgctgagtgttttt

SEQ ID NO: 6849 - DNA, 97 bp, Zea mays
tgtcacaaataaaacactcggcaaagagtttctttgccgagtgtcaaaaataaaacactcgacaaagagctcttggtcgagtgctttttttccaaca

SEQ ID NO: 6850 - DNA, 149 bp, Zea mays
atagtgaaggctgcgcagaagtcaaacagccacacggaattcagctctgcagatctcccgaagaggcccctacacattagcaaagttaaaatactttcttttcgtgtttatacgtctctaaggctggttgtttctagtataaatacgcc

SEQ ID NO: 6851 - DNA, 104 bp, Zea mays
tgcttgggacgccataggctatggcgccgaagtacgtgctgcgctggcacaattcggacgacgtggcaccaaactcggcgccaagatctatgacgccaagctcg

SEQ ID NO: 6852 - DNA, 174 bp, Zea mays
atagggctctacgcaggaaaaactgctccaacagtgcctcatttcataaaatttggtcaaaaaactataggacaccctctaaagtgactcaaatatactacaccatagtgggctgccctataatctagatttgatggtttactgttggagcggggtgttttgttggtgccctaa

SEQ ID NO: 6853 - DNA, 87 bp, Zea mays
gccacgtcaaagctcggcgccatagcctatagcgccgagatgtgttacctagataccatagcctatggcgccgagctaagggtcaaa

SEQ ID NO: 6854 - DNA, 88 bp, Zea mays
tttgacccttagctcggcgccataggctatggtatctaggtaacacatctcggcgctataggctatggcgccgagctttgacgtggcg

SEQ ID NO: 6855 - DNA, 77 bp, Zea mays
aggggaaacgagctcttctcggcgagcagcgcggtcgttttataagcctccctagctcggcgccaagatctgtggcg

SEQ ID NO: 6856 - DNA, 71 bp, Zea mays
gtgtctgaagcactcgtcaaagcctggaaaacactcagcgaaggctttgccgagtgtgacaaatagacaga

SEQ ID NO: 6857 - DNA, 218 bp, Zea mays
atgaagtattccttcctgctaacatggtactactttcatccttatttaagtgtttggttgaagagccaagtagaacagagccgttccatccctgattctaggaacggagccgctctgttctgtgtttggtaatttggaacggagcggctctgttttttgtttggttgcagagtgaacggaatggagcgtgactgtgagagcgggatgggaacggagcg

SEQ ID NO: 6858 - DNA, 86 bp, Zea mays
tgtccgccaaaccacattcgtttctgccctccaccttgaagtgtacattagatgagagatcagatcagaatagtggcctgtaggac

SEQ ID NO: 6859 - DNA, 130 bp, Zea mays
tcgatgaactgtacatcggcaacgtcctctttgtcgagtgcattatgtcgagcaatcagcaaagaaaagtcgctgtgacggtgataagtgacggtgacgaaggctttgccgagtgtattcactgacactc

SEQ ID NO: 6860 - DNA, 86 bp, Zea mays
tagcaggtatctcggtgccatagcctatggtgccgagctatgttacctcggcgccataggctatgacgccgagcaaagggtccaaa

SEQ ID NO: 6861 - DNA, 109 bp, Zea mays
gtcaacacatgtagagatggcaatggggatttccccgtcgggggttatcttcccatacccgtccctgcggggtaagaaaatccccgtcgccgtctctatcccggctttc

SEQ ID NO: 6862 - DNA, 237 bp, Zea mays
gtttgggaacattagcgggctggtgctggcacgacccgtttttttgagcgtgcctagtgggctggcccggcacgaaaagtggcccagagggtcgtgcttgggccaacggccaggcacgtgggctctctaggcacggcccgttcagcccgtatacccgggccggcccgttggctgatgggctgtgcttccccgggcccatgccgggtcgtgccgggccggcccgttggccatctatag

SEQ ID NO: 6863 - DNA, 73 bp, Zea mays
gtgggacgccatcgctgcgacccgcatcggcgtggacagggtccgtcgagcaacgttgcagcgcctacgccgt

SEQ ID NO: 6864 - DNA, 74 bp, Zea mays
caagaccatagcactcgacaaagaaagcacacctgtgaatcggtaaagctttctttgcgagtgctatggctggg

SEQ ID NO: 6865 - DNA, 100 bp, Zea mays
ctgttgtttggttgctgtgagccaggctctatgcgtgctagctttatgtttggttgactgcacgcagatttgagtccaggctcgcacgatcctcaaagta

SEQ ID NO: 6866 - DNA, 78 bp, Zea mays
tgaaaatattcttgcaggtagaagccatccgttctcgagctaagctaaggataacctctatccacaagatctaagcag

SEQ ID NO: 6867 - DNA, 95 bp, Zea mays
gtttacttccgacggccccgtcggaaacgcggatacttccgactgggtatctcctacggcgttacttccgacgggacccgtcttaagccgtcaga

SEQ ID NO: 6868 - DNA, 76 bp, Zea mays
cacgctgatcaggctgcgttggtaatcagctgagttatggcattagctgaatattggctgcgccctgacaacacga

SEQ ID NO: 6869 - DNA, 82 bp, Zea mays
tgtccgacggctagactgaccatcgtcggacataaaccttatctctgacggctgtcagcatagtcatcgtacataacacatt

SEQ ID NO: 6870 - DNA, 69 bp, Zea mays
aaattgaaacgagccgagtcgagtcgagccgagctggccacgagtcgagcgagctcaccacgagtattt

SEQ ID NO: 6871 - DNA, 149 bp, Zea mays
agatatccaatgggccgtgcccgtccggcggtatgtggcaccatacgtttttagcccgtcatgaacatggcacggctcgttattcaggccgggtttaggccgctgccgtggcacgtcgtgccggtccgagcacgatccgattatttttt

SEQ ID NO: 6872 - DNA, 120 bp, Zea mays
atgtttggtttgatgactaagttgtcacactttgtctaacttttctgtctaaggttagttcttcaattcggacgactaaccttagtcaaagtgtgacacagttagccacgaatcaaacat

SEQ ID NO: 6873 - DNA, 205 bp, Zea mays
ctgtcgtcggataaagggcatggtggactccctttatgatcttggcaagcccatccccgaccggaccctcatcctaaaccttctttgttgtaacaccccgtccaatccctggacaggcggtacttactcctagcagctatctaggatcatatattgtccccacagaccaacatgagtcttttgtgcgcactttgtcctcacacat

SEQ ID NO: 6874 - DNA, 86 bp, Zea mays
ctaatgcttgcaagagccaagaacgtcgtgccgtgctttagcaatagcctcagcccgacacgattttttttattttacaaaaaaaa

SEQ ID NO: 6875 - DNA, 68 bp, Zea mays
cttcgttttgcgcacttgttgtgctaagtccggctgcaccttttaagcgacttctgcgcggattgagt

SEQ ID NO: 6876 - DNA, 128 bp, Zea mays
cagctagtttgagagccacaaaaccggagagaattggagggattaaaattccctccttattcaattttgaataaaaaggtgattttagtccttctaatctccttcggtttttggactcccaaaccagc

SEQ ID NO: 6877 - DNA, 165 bp, Zea mays
ccctgttcgatctcgttgtcaagcttcgcctcagccttagctcgttggtcacactcgccagatattcgcttgaggacttcagctgaaggtcgtcgtcgatccgtgcgtcatcaagaaatcccaagaatcgggtgaagacgaagctagcagcgcgatattccccaa

SEQ ID NO: 6878 - DNA, 78 bp, Zea mays
agtgtgcgattggcactcggcaaagaaactttaccagttcccaggtggtctttctttatcgagtgctatggtaatcgc

SEQ ID NO: 6879 - DNA, 243 bp, Zea mays
aggcgcccccacctccaacatcgatactcgacggcaagcgggggaggaaggcaggcgcggctagggttggcagcgtggtgtcgtcagcgacgcccgtgtatggctcgcgaccctgagggtccaaggtgacgctctctggctagttcgcgcatcgtcgtcctccttctcctcacagcccagggttgaagcagacggctgggggcgcgacggtcgcagatccgaagacggggtgtgggggaagaa

SEQ ID NO: 6880 - DNA, 96 bp, Zea mays
tttgcttgcacgcttgcaaagaatgactgcttgcataacagtcgttgctctaaaactcttatgcaagcggtccttctatgcaaacgtgcaagcaaa

SEQ ID NO: 6881 - DNA, 191 bp, Zea mays
cgtcgagcccgtcgaacctcattcttccctgcccgacctggtcgaaccccgaatcccagacgttaggcaaaaataagcaaggtcagtgtgcattgcttatccagtgctcggtcgaagacttcaatcgaaggtcgtcgtcgttcgtgcatccacaagaaatcccaagaatcaggtgaagacaaagctaggag

SEQ ID NO: 6882 - DNA, 194 bp, Zea mays
caaaaaatttgcgaaggttgtcgacgttccaggagtgctctaggtcctcaccgtttggcgttgtgagcctgtaagcactgggggaagcttttgacttgactatgagggggccctccgcgcctgggctccaacttgcacatggactccgtccgagctgttcggaagagatcgttgtcaacctcgctgaactccct

SEQ ID NO: 6883 - DNA, 107 bp, Zea mays
cagtccccccccccccccccccatccaacctcagacggagtctgggagactaccacgttcgtagctagagaaaatgaaaggggtcgggggggggggggctcgtttgc

SEQ ID NO: 6884 - DNA, 88 bp, Zea mays
tgccggccgccgactcgccgttgtccagtcgccaaccacgcgtccacgcggtgaccgaagactggagcatgggagcaggcgaggcgtg

SEQ ID NO: 6885 - DNA, 125 bp, Zea mays
cggctgcaatgcctacgcctaccgcctcgcctcgcctagggatggcaacgggcacattttatccgcgtgcccgcaggtaaaaaccctatagggtgcgggtttgggtgtgagtttatacccgtggg

SEQ ID NO: 6886 - DNA, 148 bp, Zea mays
gacacattaagggcctgtttggtttgtggcgaaaagaggcacactttgtctaaggttagtcattcgaatcgaaaaaataaccttaggcagaaaagttaggcaaagtgtggcaacttaggtagtgaaccaaacatgccttaaatggggc

SEQ ID NO: 6887 - DNA, 217 bp, Zea mays
tttcgggctcgcacggcggcgtgacgaagcgagttgacaaaacaagtgcaagaactaacggcatgacaaggcgagttgacaaagcactgcaagaactaatataagactatccgcaaccgttccctctaaattttcccccctaaatattactatgcagccacgtcagcaagattctctctcctatattcactcgtcccgcaaccgttccccctaaatt

SEQ ID NO: 6888 - DNA, 112 bp, Zea mays
agcggacggatgggccaggagccgcgggaggaagaaaaggcctgtacgagtaggaccatatcgccgtcgtctcggcgaaacaccgctgcggctataggtcggtccacctcat

SEQ ID NO: 6889 - DNA, 129 bp, Zea mays
gttcatcaccctaaacactgtgctatgagtccacgagtaattgttagtagataaaaaattgatagttggtatagaaaatgatattttatagtggtagtggggtatagaggagtatttagggggaaccgc

SEQ ID NO: 6890 - DNA, 101 bp, Zea mays
catgtcccctagctcggcgccatagatcttggcgccgggctagaggctgacgtgtcccctagctcggcgccacagatcttggtgccgagctacgacggcct

SEQ ID NO: 6891 - DNA, 83 bp, Zea mays
tagctcggcgccatagatcttggcgccgggctagaggctgacgtgtcccctagctcggcgccacagatcttggtgccgagcta

SEQ ID NO: 6892 - DNA, 106 bp, Zea mays
cggcaaagtgttctttgccgagtgccagctggatgcactcggcaaagaatcttttacaatcctttgccgagtgtcgcacgctggcactcggcaaagcatgctttgc

SEQ ID NO: 6893 - DNA, 104 bp, Zea mays
gcaaagcatgctttgccgagtgccagcgtgcgacactcggcaaaggattgtaaaagattctttgccgagtgcatccagctggcactcggcaaagaacactttgc

SEQ ID NO: 6894 - DNA, 154 bp, Zea mays
atcacgaccactgctctgaccggcggcgcaccgaagggccccttcgtctgcatcctcttctgccacttcaaaaggcggatacgcagagtaatagtgagagcacatctcagaaacagggagtccttcgtggccttcgacagtagcctcagcaacg

SEQ ID NO: 6895 - DNA, 66 bp, Zea mays
catagggcggctagtgcgcggtcgagcgcttgagtacgcgatcgaacacgtggaagtgtgattctg

SEQ ID NO: 6896 - DNA, 77 bp, Zea mays
cgacgtggaaccgagctcggcgccacagatcttggctcggcgccacagatcttggcgccgagctcggttgtgttatt

SEQ ID NO: 6897 - DNA, 170 bp, Zea mays
cactcgagccgcagacgccaagggccagacagagatgcagatcgctgatcgtctatcgcagcacgttgtagtcgcagcgacgaaggacgaacggcggaagcggaacagacgaagagtcatcgtcgtatttatgtattctactggtttattgggctgcaaatgtgtatcta

SEQ ID NO: 6898 - DNA, 165 bp, Zea mays
aggcgaggaccattattatcgtgcggaggtataaatggctaaatgagtcgtgtctggcgggccgactcagggcacgacctatttaatagtgtctgggccagcctggaacgagtgttgtgtcgtgcttgagccgtagcctcggcccatagtgctgacccggcctgg

SEQ ID NO: 6899 - DNA, 156 bp, Zea mays
ccagctgcaaaccacgatgtttgcagctcctcacaaaaaagaggatagaccccactcgcagcagcaataacacaactaaaatgttacctagtggacctgcaggtgggatctattctcttttttgtgagggctgtaaacatcgtggtttgcagctgg

SEQ ID NO: 6900 - DNA, 222 bp, Zea mays
tatgaaagtgtggaatgaagtgtggttttataacatatatgagccttttcgtgcctctatatgggccattccgtgcctgccttaaacggaccgtcctcgtgcccacacataggtcgtgacctcggctcaaacccgacccgatataacaggccgtgtcggcccgacactaaattatttcgggtcgtgccgtgctggaccgtgctttttttccgtgcttcgggc

SEQ ID NO: 6901 - DNA, 180 bp, Zea mays
ggtgtatgcccgtgcgttgctacggagtcagcatgtactagtaagacgcaatgagatgtagaagcactacgataaaatacattgatgtgcaaaaacaattattgttattctatacttttgttagttacatacctaaaaaatatagtacaatgactacgttgcaatgacacacaaattcga

SEQ ID NO: 6902 - DNA, 85 bp, Zea mays
cagcatgtacctcggcgccatagcttatgatgccgagatgtgttacctcagcgccatagtctatggcgccgagcaaatggtccaa

SEQ ID NO: 6903 - DNA, 88 bp, Zea mays
aggaaaaaccgggctaacacggcacgttagacgggctgggccgtgctccggcttgtggcccaacgggccgagtagcccggcacgcctt

SEQ ID NO: 6904 - DNA, 76 bp, Zea mays
gacaaagagcttctttgccgagtgccaaaaaaagcactcggcaaaacatttggcactcggcaaagagccgaattct

SEQ ID NO: 6905 - DNA, 75 bp, Zea mays
gccacgtcacagcttggcgccataggctgtggcgccgagctgccacaggctatggcgccgagctaagggtccaaa

SEQ ID NO: 6906 - DNA, 181 bp, Zea mays
taggtgtcatcgccgaactgtatctgcgtctgcaacagagtgttgaggcggagagcaaagtcatcaacgtcctcacctggcttgaaggccaggttctaccactccttgcgaagtgcctgcagtgtggtcttgcgggcacggtcgctgccgatgcgggtcgcagcgatggcgtcccaggctt

SEQ ID NO: 6907 - DNA, 74 bp, Zea mays
ccgccttggcgtacaatgcctcactgaccccgactgccgtcgtgcagtgaccgcacttatacccaccataaccg

SEQ ID NO: 6908 - DNA, 230 bp, Zea mays
ctcaccagagagcaccgccgcctcacgccaggtcgcggaccgtccggctctatgccgcggaccgtccgcgcctgaccagagggcaccgccgccggttcttcttgagtgattggcgcctccaaaaaggtgtcaacacattgtttttttattgtctagctgatcataagtttgtagcaataatttttttgtttgtccatttacgtggggcagcaggctgctgcgctcttgag

SEQ ID NO: 6909 - DNA, 183 bp, Zea mays
atgggccatttaggccctgtttggaagcggagctttcaaatactacagtatataaaaaccatagtatacagtatgtcgtgacagaaaaccacagttttagcaaaacaggagtaaacctacattatttcttaatacatagccatgtttggtagcacagtttccaaacttgtttaaatttaccat

SEQ ID NO: 6910 - DNA, 243 bp, Zea mays
gagtgcctccttgagcactcggcaaagaagataccaaagggccccgctggaagaccctttgccgagtacaggatggtagacactcagcaaagagataatttctttgccgagtgtattaggtgacaatcgacaaaggtaatttctttgccgagtgtcacctagaacactcggcaaagtcgtcgtcttcggtaccaggcgtcgtgacggtcgcttttctttgccgagtgcccgataaaaagtact

SEQ ID NO: 6911 - DNA, 133 bp, Zea mays
attttacactcggcaaagcctttgtcgagcgttacactcgacaaagaatactcggtaaatattttatcggcaaaggcttttttgccgagtacttttttcggacactcggcaaagactttgccgagtgtagaaa

SEQ ID NO: 6912 - DNA, 241 bp, Zea mays
atttttgaagttttgtggctcgtgtgctaggttataatttttgccctttatgtttgacatgctacttggggcattttgtgtgccattttctcctgtgttacttacaattttgtttcacattttgaaacaattttcctttgtttcactttcctgtggttagtttgacatgcatcaaattcacaagttagcttcacaaaataaaagcaagttagagtcacatgtgttatatcacctcatcttt

SEQ ID NO: 6913 - DNA, 114 bp, Zea mays
gccatctatagcaaagtctttgccgagtgtccgaaaaagtactcggcaaaaatcttttgccgataaaatatttgttgagtgttacactcggcaaagactttgtcgagtgtaaaa

SEQ ID NO: 6914 - DNA, 112 bp, Zea mays
ttacactcgacaaagtctttgccgagtgtaacactcaacaaatattttatcggcaaaagatttttgccgagtactttttcggacactcggcaaagactttgctatagatggc

SEQ ID NO: 6915 - DNA, 224 bp, Zea mays
tcaaatacatcagctgacaccgaatgccgtggtggcgctgtcgaagtatgtctgggcgacgacttcgtacggcgggcagccatcggttgaagtttttgcgaagtattattgcttgcactggcagaagaggatgatcggggacaaagttgctcagtttgggtcatgcacattcacgccgaagaccggcaagactactatgcaagtggtggagttggttccatgcg

SEQ ID NO: 6916 - DNA, 95 bp, Zea mays
gatcatatatgtgtcgatgctcatcccagcgtactcccgttgcaatgcacaggcaagcgtgtatggtggtgtgtgcctgatacctgacgatgtac

SEQ ID NO: 6917 - DNA, 131 bp, Zea mays
cgtgacctgattcgcgcgtagattatagcgggccagtagaactcttgacggatcatcttggcagcgagggcctcaggcctcaagtgagagctacaagttccgctgtggacttcgcgcatgatctggacgtc

SEQ ID NO: 6918 - DNA, 97 bp, Zea mays
gtgtccgtgcgttgcaacggaaacatataatatcacagtaacttatatataaaatatgtgtattatatgtctccgttgcaacacacgaacactcacc

SEQ ID NO: 6919 - DNA, 133 bp, Zea mays
aagcatttggatcgcgatccattaccacccctagccgcgccaggggcaccagcgttagtagaggggaccaaggatgctggccgcacacaccgctggtagatgtgggtgggatgggaagacgattgaggaggta

SEQ ID NO: 6920 - DNA, 80 bp, Zea mays
tttcggcggccagacgccgccgaaaataagccctttgccgccgaaaataagctattttcggcggcgtctgaccgccaaaa

SEQ ID NO: 6921 - DNA, 80 bp, Zea mays
ttttggcggtcagacgccgccgaaaatagcttattttcggcggcaaagggcttattttcggcggcgtctggccgccgaaa

SEQ ID NO: 6922 - DNA, 105 bp, Zea mays
ggtgttctgtttgtgtcatctttgccgagtgctatgacctgtatactcggcaaaacacctctttgtcgagtgttacactcggcaaagtgactcaaatacctcttt

SEQ ID NO: 6923 - DNA, 87 bp, Zea mays
ccacgtcacagctcggcgccatgggctgtggcgccgagctgtgttacctcggcgccacagcctatggcgccgagcatcgagtccaaa

SEQ ID NO: 6924 - DNA, 116 bp, Zea mays
aagctgaagtcctgccaaacaggcagcttctgcagcagcttatcagttcagctgcttctcaaaatgaactaaaagcagccaacaagcagaagctgctttttaccagcttatcagat

SEQ ID NO: 6925 - DNA, 248 bp, Zea mays
agtgcggggtccttcgttgcgtagtctttatcgacttggccggcgactaccttggagtctgttctaatgatgcaggtggtgacaccaagtgcccttagcttgcgagggtcgaggatgacaactttcttattctgctatattgttagtgcatctgtcagaatccaaagcaaagctgagggcatgctgcgtatctgtgcttgactcctgtgggtgaagtaatgactgcagcggcgcctgcccccgcatgg

SEQ ID NO: 6926 - DNA, 145 bp, Zea mays
cgagcgccgtctttcgccgagtgttcgacactcggcaaagacttctttgccgactgtatttttgtgccgagagtcctgctctcggtaaacgtaatcgttgccgaaggactttgtcgagtgcgacactcggtaaagacttttttga

SEQ ID NO: 6927 - DNA, 172 bp, Zea mays
tcaatgactagacaaacttgtgttgtggcttggcttgtttggctagctagctagctcacgagctaatatgagctggctcattacagaaccgagctagaatgctagcttggctcgctacaaaattaaaatgatctgagtctagccgagctactaacgagcttgaaagtctcct

SEQ ID NO: 6928 - DNA, 109 bp, Zea mays
agtaaagggagcttctttgccgagtgtctgcctatctggcagttggcaaagggagcatcattgggcctctttgcccagtgcgctaggaggcacgcggcaaagggagctt

SEQ ID NO: 6929 - DNA, 73 bp, Zea mays
ggaatggcaatttaatccgtggatttggatatccggcggatatccgacccgacggattaggatatgaatatgt

SEQ ID NO: 6930 - DNA, 182 bp, Zea mays
tctgggcgctaaacacgactgagtgcagggtgactgagttcacccctttccgccttctatatggatcagaggccatgacccacagagcaagaaataaaacatgggtccccgcgaacagtttcgtcagctgttcccgacaaggacagagagccagccttgagtctcatcgatggagaccgtgt

SEQ ID NO: 6931 - DNA, 171 bp, Zea mays
tatgcagattctcgcgcctctactgctgacgggagggaaggaagcgaatctggtgatccatggtgacgtaattctcaataaaaacctggtctattattgaaaagagctattcagtatatatatttaatttcaatcctatcctagagcacagtttggcggagggtgcggcca

SEQ ID NO: 6932 - DNA, 91 bp, Zea mays
gaggacacccgcctgcgcacgtggaccgagcgattcagcttataaagggcgctgtcgagccgtacatcgctgtgactggcagatttagacc

SEQ ID NO: 6933 - DNA, 93 bp, Zea mays
ccagaaaagtagtgagaagttgccggccggcacccgtggttttttccccttcactttggaagggtggtagggcgtcttctaacactcccctct

SEQ ID NO: 6934 - DNA, 94 bp, Zea mays
caaaaatgaggatagaccccacccgcagcagcaataacacaactaaaacgttatctggtggacctgcaggtgagatctattctcctttttgtgg

SEQ ID NO: 6935 - DNA, 76 bp, Zea mays
cattcttctgcagtctacgggttccttagagcaagtataataaatttgactaggcgggctctaaacgaaaaggcat

SEQ ID NO: 6936 - DNA, 139 bp, Zea mays
tgccagatatttgacactcggcaaagactgacggccgtcggttgtagacggccgctaacggccctttgccgagagccatgtttgccgagtgcttgacgctcggcaaagcagtctttgccgagtgctttgatgtgccgag

SEQ ID NO: 6937 - DNA, 77 bp, Zea mays
ccttggtcatagcactcgacaaaagaaagcacacttggtaatcgggaaagctgattttacgagtgctatggcccaag

SEQ ID NO: 6938 - DNA, 117 bp, Zea mays
gacttaactaaaatctaacccgcgctccctgaccggctgaaacagtacccgccggcatagtttacggcgggggggcttaccggcggcagtagagctccgggcggggtggtcagtgac

SEQ ID NO: 6939 - DNA, 165 bp, Zea mays
ccgagtgccgaaggctttgccgagtgttttttatcgggctcgttacaaagcagaatttgccgagtaccgccctcggaaacgtcgagaggtgtcggtaaagagttagtttaccgagtgtagaacactcggcacatccaagcactcggcaaagacctgcttttgccg

SEQ ID NO: 6940 - DNA, 100 bp, Zea mays
gtgttttcttttaccaagggttttttgcgtggcactcggtaaagagcttctttgccaagtgcccgacaaaaaacactcggcaaagaacttggcactcggc

SEQ ID NO: 6941 - DNA, 105 bp, Zea mays
gccgccgtcgggccgacccatttatcgggccgggccgggccaaagcacgcgggccgccgtatgtgcccatacccggcccgctaaacgggtcgtgccggcccgggc

SEQ ID NO: 6942 - DNA, 106 bp, Zea mays
atattatatgttcccgttacaatgcacggacacccacctagtaatcaattaagcatcaagggtactaggtaggtgcccgtgcgttgcgacggcatacaaaatatta

SEQ ID NO: 6943 - DNA, 85 bp, Zea mays
atacattaacgactctggtttcggctaatttcggtcgaatcacgcagagaagattaaaatagcgaagccaaactcgtatcgatct

SEQ ID NO: 6944 - DNA, 198 bp, Zea mays
gccgcgggcggtgcggatggaagacgagcagcgacactggaactcctacaagctgtgaacgtgcgcgagaaaatgtgagaagagagaaaagaaggcgtccacacgtcataggaatcttactacttattaagacagcaaagctagtctgcctccctcgttctgtcgttctgccgttaatcgatctggaccgtccgtggc

SEQ ID NO: 6945 - DNA, 218 bp, Zea mays
cggctaccgtgccacggacggtccagatcgattaacggcagaacgacagaacgagggaggcagactagctttgctgtcttaataagtagtaagattcctatgacgtgtggacgccttcttttctctcttctcacattttctcgcgcacgttcacagcttgtaggagttccagtgtcgctgctcgtcttccatccgcaccgcccgcggcaaccgcacga

SEQ ID NO: 6946 - DNA, 137 bp, Zea mays
tttttatccaagttcaaacgaacagttgtttcaatccgagccggattataatcaagattatttctttccatccggaggaaggctaggaaataaggatccgaccgattgaggccttgttcgtttgtgttggattgtac

SEQ ID NO: 6947 - DNA, 80 bp, Zea mays
ggacacgctgatcaggctgcgttggtaatcggctgagttatcgcattagctgaatattggctgcgccctggcaacacgac

SEQ ID NO: 6948 - DNA, 82 bp, Zea mays
gcgctagggccatcctgcagacggcgtgcctgtccagtccattgtcaaacagtgtgcccgtgctgcggggtgcatctgtgtc

SEQ ID NO: 6949 - DNA, 81 bp, Zea mays
ccgagaaaaagtactcggcaaagagggctttgccgatgcactgtgtgccgagccttctttgccgagtgcgacactcgacaa

SEQ ID NO: 6950 - DNA, 75 bp, Zea mays
gagaaaaagtactcggcaaagagggctttgccgatgcactgtgtgccgagccttctttgccgagtgcgacactcg

SEQ ID NO: 6951 - DNA, 197 bp, Zea mays
tgcaggcatgcaagctttgccgagtgccagtcggccatatacagagaaaagcgtccgtcacagcgccggataacgttattgacgtctttgccgagtgtctaccaacctgcactcggcaaagggtccaccagcggggctctttgtcaggttctttgcgagtgctctaggaggcactcgacaaagcttgcctctttgcc

SEQ ID NO: 6952 - DNA, 83 bp, Zea mays
ggaccgtgtcggcctggctcagatgagctagcgggtcgtgtcgtgccggcccacgggccacgagtgaggcccagacacaaccc

SEQ ID NO: 6953 - DNA, 93 bp, Zea mays
ctggcaggcggaccgtcggacgtaagcttatgttcgacggctgtcagacaagccgtcggacataagcttatgtccgacggtcttctaggtggt

SEQ ID NO: 6954 - DNA, 116 bp, Zea mays
tgttcatttgtgccggattagtatgtcggaacgattcatagccggattgcttctctaatttatataaactttgattagctgaaacgattccgggtgcaatccgacgtaaacgaaca

SEQ ID NO: 6955 - DNA, 174 bp, Zea mays
gccacctaggaaaccgtcggacataagctatgtccgacggcttgtcggacagccgtcggacataaacatatatccaacggtccgcctgacagccctcggatattctcccttatatccgacggctgctagcggccgtcgaaacataagcttatgtccgacggcctcctaaacaac

SEQ ID NO: 6956 - DNA, 171 bp, Zea mays
gatgttgagcaccaactatgacgtgtgtgcagatttttgggacttgacgagctgggcagagcagagggacaaccccgcgttgcatcgacggcagcgcgacactagcaagacccgagtccgtacgggccgacagcatggacgagcagacacgacacagaggtgcgagtccgc

SEQ ID NO: 6957 - DNA, 124 bp, Zea mays
ttgactatgcggtggccctcgctgtcattagttatttggagccttcaggggctccggacggctggcgtgtctatgtattgtaagaacacgtcgggagggcaaggactcgccccctggcggcggc

SEQ ID NO: 6958 - DNA, 169 bp, Zea mays
ctagctgagtgtctgtgcgttgcaacgagaatatataataccagtatactacgatttacatacaaaatgtgtgttataccgttatgagaaaaggtttcacaatcaatttgattttgttatattaatctatctatttcaccactacattgcaaccatcagtatcatgcag

SEQ ID NO: 6959 - DNA, 121 bp, Zea mays
gacatatgatatccgtcggcttaggactaacgggaactaaccatataccgacgggaattagtaatccctgtcagtttagagcttatttccttcggttcttagccgacaggaattaagtgga

SEQ ID NO: 6960 - DNA, 175 bp, Zea mays
ttgactgttgaaaaaaaatactcggcaaagaagctctttatgtcaaaaaacattcggcaaaaaagctctttgccaagtgttaaaaaaactcggcaaataaactctttgccgagtgtcaaaaataaaacattcggtaaatagtttctttgccgagtgtttttttatcgagggtttt

SEQ ID NO: 6961 - DNA, 175 bp, Zea mays
tatcggaattcggctttttgccgagtgctaaatgatttgccgcgtgttttttcgggttctcggcaaaaagcttttgtcgagtccaaccaaaaaaccctcgataaaaaaacactcggcaaagaaactatttaccgaatgttttatttttgacactcggcaaagagtttatttgccg

SEQ ID NO: 6962 - DNA, 170 bp, Zea mays
ttacaacatcatcggagtttaacagaagtagtgctcattgttcggattgcagcggaatagaactaacgataaataaacggagggatggggaagcctgtcccatcaatcctcatgctcctcctctgtctatttatggtcccactcgactgtccaacccggtggcatgatgg

SEQ ID NO: 6963 - DNA, 77 bp, Zea mays
agaaaatctaatgtggctataggctgaggctgtagcatgctgcagtctgtgcactggagcagcatgggcgagaagcc

SEQ ID NO: 6964 - DNA, 190 bp, Zea mays
gatcctagagagctgccaggagtaagtactaccggtccgggagtggacgggatgttacatagtcaattcgtataaccgactgtgaagaatagatttagacaaaaataatgatctcagtgatcttgtgattagtattcacggagggtcaacacatgaggctagtatatgcaactggctagcaaaaaatacc

SEQ ID NO: 6965 - DNA, 168 bp, Zea mays
tgcaggcatgcaagctttgccgagtgccctctacagctactcaagcaaagaacctgacatggggacccgctgacggattcttagagagggctggcaggcaggcactcagcaaaaataccttctgtgcctagtgtactaggaggcactcggcaaagatgccgtctccgt

SEQ ID NO: 6966 - DNA, 146 bp, Zea mays
cggatcctaaggacttgttcgtttgtgtcggattgcacctggaatcgttccagctaatcaaagtttatataaattagagaatcactccggttagtaatcgttccgacccacaaatccggcacaactaaacaaggcctaaatgtttc

SEQ ID NO: 6967 - DNA, 94 bp, Zea mays
gacctaggaaggccgtcagacataaggttatgtgtgatggctctaagggctggccgttagatataagcttatgtccgacggccgtcacagattg

SEQ ID NO: 6968 - DNA, 76 bp, Zea mays
cacgttgatcaggttgcgttggtaatcggctgagttatggcattagctgaatattggctgcgctctggcaacacga

SEQ ID NO: 6969 - DNA, 95 bp, Zea mays
tctgtgctctttgccgagtgttatgaccctgacactcggcaaagcgcctctttgccgagtgttacactcggcaaagtgaccagtatgtacctttt

SEQ ID NO: 6970 - DNA, 157 bp, Zea mays
ttcagaacccctaagggtgtgttcgtttgttccggaatcttttatctataaccaatccaaccagaaatgcttatctaatttgtataggctttgatcacctggaaccattcctgccccaaaccagaacaaacgaacgcagcctaagtgatctgttgtg

SEQ ID NO: 6971 - DNA, 78 bp, Zea mays
caccagctgacgtcgaatgtcgtggtggccctggcaaagtatgtctgggcgacgacttcgtacgacgggcagccctct

SEQ ID NO: 6972 - DNA, 256 bp, Zea mays
ggaagatgatgtccgcctgactgccgttgtcaactaggactttatgcaggtcccagcctgccacgctgcaattgataaccattgcgtcgcagtggggggcactgcgcaggtcgacgtcccgtgcgtcgaaggttaacggtatgtgggaccactttgtctgcatgactggacccgtgacggcgacatggttgatgttgtggtaatggtcccgcttctgccgcttggtgtcgaagtcagtgctggacccccccagtta

SEQ ID NO: 6973 - DNA, 114 bp, Zea mays
gcaaagaatgctttgccgagtgccagcgatctggcactcggcaaagcttattttaaaattaaaaaaaactttgccgagtgccagatcacaggcactcggcaaagcgccctatta

SEQ ID NO: 6974 - DNA, 174 bp, Zea mays
cggcctcggctctcagcaggaaatcagcaagcacaagtcaacaacgcagtacccgtcatgtcactcacaggaagccaagacacccactgggaataggacggccctagacttcacatcatacaccccctagatgtataaatagggcagtggtggttcctccaagggcagaaggcg

SEQ ID NO: 6975 - DNA, 185 bp, Zea mays
tagaagtttaccagggcctttaggaagttatgcagctaacttcctatgaattactgtagcctctaggaagttaggctaacttcctagaggctacagtaaaccatagtaagttaggctaacttcctagaggctacagtaaaccgtagtaagttaggctaacttcctagaggcccagtaagtctcta

SEQ ID NO: 6976 - DNA, 136 bp, Zea mays
ggctacgtacgaggccgtcggacataagattatgtccgacggctgtcagggtagccgtcggagataaggcgatatttccgagagtgcttggtggccgtcggacataacgctatgtccgacggcatcgtagacagcc

SEQ ID NO: 6977 - DNA, 106 bp, Zea mays
cgtcggacatagcgttatgtccgacggccaccaagcactctcggaaatatcgccttatctccgacggctaccctgacagccgtcggacataatcttatgtccgacg

SEQ ID NO: 6978 - DNA, 111 bp, Zea mays
gttgacggagacggcggctttgccgagtgtcaacggtgacactcggcaacgaagatatctttgccgagtgtccgcctggcagcactcggcaaagccgccttctgtgccgag

SEQ ID NO: 6979 - DNA, 137 bp, Zea mays
gagtgctgccaggcggacactcggcaaagatatcttcgttgccgagtgtcaccgttgacactcggcaaagccgccgtctccgtcaaccggcgccgtaacggtcgcttttctttgccgagtgcaccctgacactctgc

SEQ ID NO: 6980 - DNA, 118 bp, Zea mays
ggtgactccgagggcccttagcttgcggaggccgaggatgactgcttcatactctgctatgttgtttgtacatttgtcggattccagagcgaagctgaggcgtgctgcgtatctgtgt

SEQ ID NO: 6981 - DNA, 157 bp, Zea mays
ttgtcgggccggcccaagtatggtccagtcactcgtgtcgggccggccggcatgatgggctgaaaatcaaagcccagcctagccctatactcatgccgtactggcacggcacaatatatttcgtgtcggaccgtgctttgagccagttttcttaggc

SEQ ID NO: 6982 - DNA, 131 bp, Zea mays
cacggtcgaggactggcgggacacgtgtacaagacgtgggggacgcacatgcggtgtgatactcagtggttggggtgacctagaaaaccacccaacgtatggacgacgggtttcgccaatttggctcaatt

SEQ ID NO: 6983 - DNA, 121 bp, Zea mays
ggtggcagtcggcaaagcattgccgagtgcccaacaaaaaataatcggcaaaaagccgtatcgatgtatgagacttctttattgagagtcacactcggcaaagacttcgccgagtgttttc

SEQ ID NO: 6984 - DNA, 96 bp, Zea mays
actcgcgcccgtcgcccgtcgccgcccgagcgccaccaagccatccgcggccacccccacgcgctcggccggccggccggccaccaccgccgccgg

SEQ ID NO: 6985 - DNA, 221 bp, Zea mays
ccaccccctttctttgccttcgctggatccgtcgctgccgcggccttcccggccggatccacgttgttgcgacctttctggctcgatccgccgtccctttggctggatcgtgtcttcccgactgcatccgtcgctgccgtggccttcccggccggatctgtcgtttccccttctattctgccgcgggcgcggacaccatgactggcgcagacgcgtgcgct

SEQ ID NO: 6986 - DNA, 177 bp, Zea mays
gatattcctggcgacgaggggggtcagcagcgggatgctggttggcgatgttgtgcacttgttgctgattgcggccgtctcgaccggagtctggctacggagtcctcgtccatgtgcggctggactgcggggcatctttgggtttccgctgtgactcaaccttgcgctggtggagct

SEQ ID NO: 6987 - DNA, 161 bp, Zea mays
gttgtagtactgccactcggtaaataagcttccattgccaattacggctagcacagtcgacaaagggattggcaaaggggcccactggtgctccttttgtcgagtgcgagacagacactcagcaatgagagcttctttgccgagtgtcaatttgcggctct

SEQ ID NO: 6988 - DNA, 228 bp, Zea mays
gcacggcggaccgccgcggccgagcaccgacgatgccaaaattggcctagcacagagcgaaactagagaaattgagcacggggacgggtgtctcacctcggggcggagctggcggcgtgagcagagcgcgagagagggtgaagctgagcgaaatgaggcaaggggtgtgcgcggggcactggcagggctctaagaagggagctgggcgcgtgggcgggcgtcgtggcc

SEQ ID NO: 6989 - DNA, 261 bp, Zea mays
gcgtggttctatccgaagccatctgccatggaaagagagtcaatattatgcacatgctattttttttaactagttattttattcattacatcaagccattacataacacaacaccctgctaccacaagctcatcacacgcgagtgctatctagggtactcccgaactccttctctaaagtgtccccaaagaccttgagaaggtcatcaaggctggccagggacatctcttcggtgtcggatgagttccgatggaggccttt

SEQ ID NO: 6990 - DNA, 188 bp, Zea mays
gatgttgtagaaagatactgggccagtttggtgcggcgcgtccgacgccacgacgcgcctaagccgtggcggtcaaatcggccgccacacctgcggcggtaaaactatggcacgtctaagccgcggcgacaaaattatggcgcgccgtggcggcttaggccacgcaccagacagccccactatcgaaa

SEQ ID NO: 6991 - DNA, 164 bp, Zea mays
tctctctcttcaccagttcacccgcgtcgtagtgtttctcatcctcctcacctcctgcagtgctttttaacattttacactgagttgatttagaagaaatgtatggacttttttataaaaagatgatgcaggacgaccgttgaaactggtgctttaagtatagt

SEQ ID NO: 6992 - DNA, 126 bp, Zea mays
aggcatgcaagcttgttcagttaggccaataacgctctgaatgtcctctaatctttttctggatttgcataacgcccttacatggctcttctgaattggtctaaccgaacaagctctaaagtggta

SEQ ID NO: 6993 - DNA, 184 bp, Zea mays
cttgagctgtgtgtaagcctgaatgacttgcgtctgagtgtccctgtctagtcccttttttggtgctcgtcggtcctctctttgtaacgttgtatgcctctccttttatagttcaaggggggcatgtacaagggttctgatctgtgacggaacctctcaagtcattaggcctaccaacagttgt

SEQ ID NO: 6994 - DNA, 257 bp, Zea mays
gtgctaatcgcttgcggcttgcctgcccggtctcgtggctttgtgctgctcccgctgtggtgaggaaccctaggatggcgggggtttcgatggcggcggcgcctgagggggtgctgcaccgccggattgagtttcatcttgcacggagaccgcatggctctgtggcggtgggcggcggcgggttccggatggagacgctgaacccggacgccgctggtaaggtggggcccggggaggcggtcgggagcagcgagggg

SEQ ID NO: 6995 - DNA, 107 bp, Zea mays
accctccatatccaacggtgctgcgtcaggggggtttttgtaatatgcacaaagtttctaagaacagttggggccccccgtgtcctgacatcgttcgccatggaggg

SEQ ID NO: 6996 - DNA, 66 bp, Zea mays
gacgtggccgcaacggctagttgcgtctagggcttacctggctctgacgtggcggcggcgcggcct

SEQ ID NO: 6997 - DNA, 82 bp, Zea mays
tgtatttcgggtatccgacccgataggaccgacgggtgagtttttgtacccgtatccatatccggtgggtacgaaacccgcg

SEQ ID NO: 6998 - DNA, 76 bp, Zea mays
tgcagtggcaaagcactcggcaaagaagccgtcactggaaccggtaaagcttctttgtcgagtgttgctgccttgc

SEQ ID NO: 6999 - DNA, 112 bp, Zea mays
gactaggtgagtgtccgtgcgttgcaatgaagccatataatactcacatgttatatataagtcactgtgatattatatgtcaccgttgcaacgcacgggcactcacctagtt

SEQ ID NO: 7000 - DNA, 255 bp, Zea mays
aatttctaatcctgaggaggcatcagcgaaccttaaccaccagcttaacgttccttctctatggagattattattctcatgacttggagcatctggaaaagccgaaacgagtgattgttttcaaacaaagatccttcggtacatcgctgtacgcaggaattcagcaaagagccgtggttgatcattcacagagcgtgggggaattttgacacctctatcccgaattggctgagtctgtggcaggcataggagtag

SEQ ID NO: 7001 - DNA, 75 bp, Zea mays
atgcccgcctccttccttcccctcctcctctacgaaaccttgggtgtgggggaggcgagggatggggtctctaat

SEQ ID NO: 7002 - DNA, 231 bp, Zea mays
actaatatacaagcacatactaggtgcaagcgtccaaacagacttttttgtccattagatttaaattcaatggcagataaaattatggtttgttagggttttttttataaagctacaatagatgatggtggaagggtttaagtgctaaatatgacataccgttggatttagatcaaacagagtaaaatatctaatcgcatgcttacatctagtatctgcttgcatattaga

SEQ ID NO: 7003 - DNA, 95 bp, Zea mays
cggattccttcactatagggtcctcaaccttgtagatatcacgctcgaaatcctcatcagcttagtcgaagacctcatagtgccagcacccttcg

SEQ ID NO: 7004 - DNA, 114 bp, Zea mays
taggtgagtgcccgtgcgttgcaacggaaccgtataatgacacgataacttatgtacatacgtgtgttatattggtatagatatgtgtccgtgcgttgcgacggaagtaaaaga

SEQ ID NO: 7005 - DNA, 233 bp, Zea mays
ttcccgagccgggacgtggcggcagacggcgacgttaggaagtccggagacgccggcgggggcctcgggaagagttatcttttctgcttaacggcccgccaaccctggaatcggttcagccggaggtaggggtccagcggccggaagagcaccgcacatcgcgcggtgtccggtgcgcccccggcggcgactagccattcacgaccgaattccgtccacgcccggtcgataac

SEQ ID NO: 7006 - DNA, 85 bp, Zea mays
gcggtacgtgggaccacttcgtctgcacgactgggccggtgatggcgacgtggttgatgctgcggtagtggtcctgcttctgccg

SEQ ID NO: 7007 - DNA, 194 bp, Zea mays
tttagggggtgtttgggatggctacaggttccaactccagtgtggagctatagtttataacatcaatttaattagttttaaaaatatttttaatctaaataataaatgaaatgacttatctaaatgtattctaaaggcttacaactctagctccacgattttctaaacctagagctatcccaaaaaggctttaa

SEQ ID NO: 7008 - DNA, 128 bp, Zea mays
gacactcggtaaagtctgtgccgagtgcccgagaaaaagtactcggcaaagaagcctttgccgatgtactgttcgtcgagccctctttgccgagcgcgacactcggcaaagactttgtcgagtgtttc

SEQ ID NO: 7009 - DNA, 110 bp, Zea mays
tggaaaaggtgttgtgtatagagcacttcccaagtcctgcaattatttgataaaccatgtaatcatttatagtagtactaggtgagtgcctgtgcgttgcaacggggaca

SEQ ID NO: 7010 - DNA, 143 bp, Zea mays
  unsure (55): n = A, C, G or T
tgacacatggaccccacctgtaggcgcgtccgcatcgacactcgcttgctccctntgagccactgacagcccatccccacgcgtcagccctcacctcgcacttgtccccgttgtccctcgccagtgggacccacatgtcatct

SEQ ID NO: 7011 - DNA, 86 bp, Zea mays
ggacccgatactcggcggcataggctgtggcgccgaggtaacacagctcggcaccacagcctatggcgccgaggtatgacgtggca

SEQ ID NO: 7012 - DNA, 104 bp, Zea mays
cgattgacgagttgagcgactccgacgatttaacggcggccgcgacagcgagcagggtcccaaactcaacgccgacgtcgaggagtgctaacactacggtcggg

SEQ ID NO: 7013 - DNA, 179 bp, Zea mays
gttttttaagctggtgcccaaagttttgctggtgtcctcatttttacccttagtcatgtttttactcagttttgtctttctgttatatagcacttcaagagtaaaactgagcaaaaaaaaacacgactaagaataaaaataaagacaccagcaaaactgagggcaccagctttaaaaaa

SEQ ID NO: 7014 - DNA, 90 bp, Zea mays
cctcctccatcagccagcagaacaagacccagtatcaaggaagggccacgaggccatccaccgtcgatgctctgaaggctcaaacacacc

SEQ ID NO: 7015 - DNA, 156 bp, Zea mays
gggttttcttaggccttgttcgtttgtgtcagattgtacccggaatactgtaactaggttcattgtttatataaattagagaagcaatatcctgtccctagagatcacttctcgacccactaatccggcacaaatgaataaggccttaaggaaccc

SEQ ID NO: 7016 - DNA, 63 bp, Zea mays
atagcctatggcgccgaggtacgtgctacgctggcacacctagatgtcgtggcgccgacgtgg

SEQ ID NO: 7017 - DNA, 109 bp, Zea mays
tgacgcctgtcggctgacaaccgacgggtttaagccttaaaccgatgtgaattacttattcccgtcggtttaaggcttattcccgtcggttcctggccgacgggaatta

SEQ ID NO: 7018 - DNA, 213 bp, Zea mays
gactgaaacaagtaactgctgtattgctgtccaaaaatctgcatgtgcacatttgatggttgagttcacccttttggctaaaaatgcttaattagcacttaacgaacttagatttgtgatgtctaaacttaagttaacatgtgtccatgatcaatgtgcttgcttgctgtagttgagtgtagataggagttccgtagttattgatgtctatgt

SEQ ID NO: 7019 - DNA, 99 bp, Zea mays
gcgatcccaccccgccgagttgctcagcgggtgtgttgttggtcgagcgggttagtcgacagttccgccttgctgagttgctcgacgggagtgttggtc

SEQ ID NO: 7020 - DNA, 130 bp, Zea mays
aggctgtttgcagcccctcacaaaaatgaggataggccccacctgtaggccaataacacaactaaaacgttatctagtagacttgcaggtgaggtctatcctcttttttgttaggggctgcaaacagcct

SEQ ID NO: 7021 - DNA, 245 bp, Zea mays
cagcgtgagggtcgctctaaatcgctacagggaaaggggagcgcgggtgtagcggatggcgctgcagctagccttatatgccctaacgtcacgcaggccatctcggcctctccgctacggccggaatctgcactcgcgcggctggatgcccctcccggctcccagttccccggccccacctacgtaccgtgcggccgctggtctatcctcgtgcgacctgctagtatttcggtgcccatttcacg

SEQ ID NO: 7022 - DNA, 78 bp, Zea mays
catgctggtctggcactcggcaaagaaagctcaagtgggccctcatgcgagcctctgtgccgagagccgcaagctggc

SEQ ID NO: 7023 - DNA, 212 bp, Zea mays
acaagaagctctttgccgagtgccacgcaaaaaacactcggtaaaagaaaacactcggcgaggagtttctttgccgagtgttgtatttttgacactcggcaaagagccctttgccgagtgccaaaaatataacactcggcaaagaaactcttcgccgagtgttttcttttaccgagtgttttttgcgtggcactcggcaaagagcttcttgt

SEQ ID NO: 7024 - DNA, 71 bp, Zea mays
tcgtatatcagatgcttccatcatcacagctttccgcaaggggtacgtgatgaaaagaagttggaaaagtt

SEQ ID NO: 7025 - DNA, 140 bp, Zea mays
tacatccctatgggctgatttggtgaccaggtatcacgagaggatctatggggaaggtatcttcatgttattcaattttgaatagcaagggaattccttccccatggatccctgatcaccacagcagccctatattttat

SEQ ID NO: 7026 - DNA, 77 bp, Zea mays
ggtttttgaaatgtgaccgttgatggacatgttactgttgtactgcgtgtttcccgaaccgtcgcgtcctgtctata

SEQ ID NO: 7027 - DNA, 97 bp, Zea mays
acctttgtgcaaatgacttgagaggtgtaggattaagtgggaaccttccgggccgcagtgaaatacccactacttttaacgttaattttacttattc

SEQ ID NO: 7028 - DNA, 157 bp, Zea mays
agtgttttttaggcactcggcaaagaagtttcttatcgaatgccaaacaaaaaacactaggtaaaaaaaacactcggcaaaggatttctttgccgagttttttttttatttttgacactcgataaaaagcttctttgtcgagtgtttttttcaacat

SEQ ID NO: 7029 - DNA, 145 bp, Zea mays
gtgcttttcgacgtctttgccgagtgtctgaaaaaattactcgtcaaagaatactttgctgataaaatatttgcagagtattttttgccgagtgtaaaatggaatttgccgagagactaagacactcgacaaagaacgcgagttc

SEQ ID NO: 7030 - DNA, 150 bp, Zea mays
tccagaactcgcgttctttgtcgagtgtcttagtctctcggcaaattccattttacactcggcaaaaaatactctgcaaatattttatcagcaaagtattctttgacgagtaattttttcagacactcggcaaagacgtcgaaaagcact

SEQ ID NO: 7031 - DNA, 255 bp, Zea mays
atcgggttaagagcgcgacggtgacgtggcggcagacggcgacgttaggaaggcggaaaagctccgcgggggcttcgggaagagttatcttttctgcttaacggcccgccaaccctggaatcggttccctttggaggtagggtccagcggccggaagagcaccgcacatcgcgcggtgtccggtgcgcccccggcggcccttgaaaatccggaggaccgaattccgtccacgcccggtcgtactcataatcgcat

SEQ ID NO: 7032 - DNA, 113 bp, Zea mays
tgactcttcgtcgagtgcttggcgctttgtcgagtgcttcctatcgggcactcggcaaagaggtttttgccgagtgccgcactcggcaaagtcctgctctcggtaaggacggc

SEQ ID NO: 7033 - DNA, 109 bp, Zea mays
gagacagtcttagggctagtttgggagccgtaaaaccggaggggctaagattttagcccctctaatcatctcctgtttttggactcccaaactagcccttagggtagtt

SEQ ID NO: 7034 - DNA, 253 bp, Zea mays
gcgaactacggaggcggcgacgcggctgagatacgaagagagtgatagagaaagaaggaaataccagcgctatgtaaacgcgctttgccgagtgcccgtgatctggcactcggcaaagattttttttattttaaaataagctttgccgagtgccagatcggggacactcggcaaaggctcctttgccgagtgtcgacgaggtgacactcggcaaagtctaacttacacttctttgccgagtgccacccagtgg

SEQ ID NO: 7035 - DNA, 120 bp, Zea mays
tcggcaaaggagcctttgccgagtgtccccgatctggcactcggcaaagcttattttaaaataaaaaaaatctttgccgagtgccagatcacgggcactcggcaaagcgcgtttacatag

SEQ ID NO: 7036 - DNA, 108 bp, Zea mays
ccgtcggacataagcttatgtccgacggctgtcagggtagccgtcggagataaggcggtatttccgagagtccttggtggccgtcggacataacgctatgtccgaccg

SEQ ID NO: 7037 - DNA, 151 bp, Zea mays
gtaggttgtcatcgttcgtcttcgttcgtcttcgtatcgtgtagcagcgcgtcccttatcgtgcccatggttaatactgccattcctgctgtgcctcgcttctgttgtgtttgattaaatgtcggaccaagattccacgatgtcactcatc

SEQ ID NO: 7038 - DNA, 155 bp, Zea mays
gtcggatccagttggggtcatcacaggccgccgggccctccgtcgcggttacaggagggtgatgggaagggctcgtgcttccacttcctctgctccatccggcaccaatggcggcaggtcagggcttcctgctggtggcgttggcgatcctgaca

SEQ ID NO: 7039 - DNA, 233 bp, Zea mays
cgcataaactgcatggttatctattttgctacaaacattgctaccaactctagacataatgatgaggacatcacctgcaacatgagtacgactacaccagcagcacctccacatcaagcgccacttccttcattagctgggccaatcactcgggctcgtgccagagatcttaacttcgtcctgctactgaagaatgagggcccagaagaatagacgaccagcccaactacggc

SEQ ID NO: 7040 - DNA, 93 bp, Zea mays
ataggtgagtgtctgtgcgttgcaacggagacatataatacataagttaccgtgatattatatgtccccattgcaacgcatgggtactcacct

SEQ ID NO: 7041 - DNA, 249 bp, Zea mays
ggcaagaaaaggtttctcgacgataagaagggaaataaagacgaccagctacttgaagtagtctgggccctaaacacgaccgaatgccaggcaaccggattcacactttttttgtctactatatggatcggaggccatgacaccggaggagataaagcatgggtcaccccgaacaagcacatcagcagtccccgacgtagacgaaccaacgtctaaagacctcatcgacggagaccgtgtcttcgccct

SEQ ID NO: 7042 - DNA, 80 bp, Zea mays
gcgaaactgggatgatctgaaaggaagtcgcgcccccgcaaggcgaggggccggatttcggcggaccattcacgcgcatg

SEQ ID NO: 7043 - DNA, 189 bp, Zea mays
ctgcgatcaagttccgcgagctcaacgccgtcaccaacttcgacatgagccgctacgacgtggagagcatcctcagcagcgacctccccgttgtgggcggagccaccgggcgcgccgccaagttcccgttggactcgctgcagccggggagcgctgccgcgatgatgctcgctggggctgctgccgctt

SEQ ID NO: 7044 - DNA, 113 bp, Zea mays
cgaggatttagagtggttcgggccgccagagcgtaaaaccctactccactgtgtgttggattgttgaggaagcttgtgctgtgtgtaagcctgaatgacttgagtcttctttc

SEQ ID NO: 7045 - DNA, 77 bp, Zea mays
gttggctcggggagactctggcggtcacgtcgaggtacggcttgtcgtcggggatggccggaatcgcccgggtcacg

SEQ ID NO: 7046 - DNA, 177 bp, Zea mays
tacgcgtctagctgcatggatgttgcagcgatccaaaatttatggaggaaataaagcatttacaaatagaaaccggcacacatatctttcctaaatttatgcgcatgcattgtatcgtgtttgactcatgcatgcattcttttctttgcgctaacagacgtggggcaggtgacacac

SEQ ID NO: 7047 - DNA, 154 bp, Zea mays
gccagtgatggagactttgccgagtgtttggctaggcacttagcaaagcggctttcttgacaagtgctggctctgaggcacttgcaaagaaagctcctgtggccccccatgcgcagtgcctttgttgaaactatgttaattttttatcacacac

SEQ ID NO: 7048 - DNA, 95 bp, Zea mays
agcgaggtcgggtgctaggcagacccacagggcacggtaccaaggcgggagaaccagtcatagtgcgtgggacgggcttagcaccaggtggccac

SEQ ID NO: 7049 - DNA, 81 bp, Zea mays
tgtagtgtggtcttgcgggcctggccgccgccgctgcgcatcgcagcgatggcgtcccaggcctccttgaaagtccgcttc

SEQ ID NO: 7050 - DNA, 173 bp, Zea mays
aatcctcgattcaggttgccggttaaagacggtggttggcttcttagcttttattgggtcaggttgcactagttatcgctgcttgcgggaaggtaacttggcttcttcgaagctagttatctgaagatttatactacgtcgtgaagatcgggcatcgtgacacatcaaggatc

SEQ ID NO: 7051 - DNA, 111 bp, Zea mays
cgactcgacgccatagatcttggcgccgagatacgtccttcgctggtaacaacaggctgacggggtgtcgatgtagccgagctcggcgccatgattcatagcgtcgagatc

SEQ ID NO: 7052 - DNA, 125 bp, Zea mays
cttggcggatctcgacgctatgaatcatggcgccgagctcggctacatcgacaccccgtcagcctgttgttaccagcgaaggacgtatctcggcgccaagatctatggcgtcgagtcgtgttacc

SEQ ID NO: 7053 - DNA, 230 bp, Zea mays
ccacgcccccgctccgcatccaccgcaccacgcttaccaacatcatcaggaagtacaaatcgtacctcctccacccccaccaccacaccagcaacaccaaaacattccccatcccccaaagcaagaagacttcgccgatcaaccttatcgcgggagtcattcacatgataacaggggggtcaagcaccgacttcgacaccaagcggcagaagcgggaccactaccgcagc

SEQ ID NO: 7054 - DNA, 70 bp, Zea mays
cgtattacgactcgcgcagtggctattgcacgtccacgaggacgtttcatatcatgcgcgcaccatcgtt

SEQ ID NO: 7055 - DNA, 77 bp, Zea mays
tttctatcaaacactcggcaaagactttatcgagtacgcaaaggtactcgacaaagactttatcgagcactcaaagg

SEQ ID NO: 7056 - DNA, 96 bp, Zea mays
attcttattggactttgtgtgcggtgtggcccctgggagatgggggcccaggtcggccgcccctcccgccctacctcaggcacggccctgagtcct

SEQ ID NO: 7057 - DNA, 197 bp, Zea mays
tgcctgcttgtgcttggactttggatcgctgcatgtcctatggtctcctgccctgttggtgttgctgttggactctggtcattggcacccggtaaaagaaggaggaacatttgtttcctgcttgcaagttttctggtgcagggaacacctgagtgcaggactgcagcagagttaggtgtccacagcatcaactagga

SEQ ID NO: 7058 - DNA, 87 bp, Zea mays
ggacccgatgctcggcgccatattgttgtggcgccgaggtaacacagctcggcgccacagcctatggcgccgaggttttgacttggc

SEQ ID NO: 7059 - DNA, 151 bp, Zea mays
aaaaatctcttagggctagtttgggagcctaaataccgaagagaattggaagggctaaaatccccaccttattcaaaattgtataatgagagaaatttagcgtctccaattccctccgattttgtggctcccaaactagccattagagttg

SEQ ID NO: 7060 - DNA, 121 bp, Zea mays
agtttagaaagctgatttggtgaccagagattatgggtgggggacggggggtttgaacgagaaattagttcatttccctccaattcccctgattcttttgtcaccaaatcaactctaatgg

SEQ ID NO: 7061 - DNA, 160 bp, Zea mays
cgccaacaatttgcagcggaaatcttattaccaaatattacaagtgacatcaagtttacattgtacatgatcggagtgattacgaaagtgattcaaggaaataactttgaactgttataaattatctatagttttgagatatatgctagctcaagtgacc

SEQ ID NO: 7062 - DNA, 85 bp, Zea mays
aaattaaaaacgtgggtacccacgttcttcgtcaaacccatgaatttaactaaaataagaacgtcggtacccacgttcttagttt

SEQ ID NO: 7063 - DNA, 146 bp, Zea mays
tagtaatgatgtgcttggttcggtgtcaacgaaggatgagataggattaatcctgagttgatcccatcccttattttttgagggatgaccccatccaatatttttgaagaatattccttgaccctgactctgtacctccaaaccaa

SEQ ID NO: 7064 - DNA, 222 bp, Zea mays
aaaattggtgcaacccgctgcaaaccagaatgtttgcagcccctcacaaaaaaaaaagtttgacctcacccgcagcagcgctctaaaaaaagagatttggccccacccgcagcagcattaacacaactaaaacattatctggtgaacctacaggtgtggtcaatcctctttttttgtgagggactgcaaacattctagtttgcagccgtctgcaccaatttt

SEQ ID NO: 7065 - DNA, 128 bp, Zea mays
aaaaaaagaggattgaccacacctgtaggttcaccagataatgttttagttgtgttaatgctgctgcgggtggggccaaatctctttttttagagcgctgctgcgggtgaggtcaaactttttttttt

SEQ ID NO: 7066 - DNA, 109 bp, Zea mays
accgaaaacagcttctttgccgagtgtctgaagcactcggcaaaggctggaaaagactcggcgatgtctttgccgagtgtgacactcggcaaagaatgcttacatcccg

SEQ ID NO: 7067 - DNA, 90 bp, Zea mays
gttaggacccgatgctcggtgccataggctgtggcgtcgaggtaacacagctcggcgccacagcctatggcgccgaaatctcaacggcgg

SEQ ID NO: 7068 - DNA, 99 bp, Zea mays
gcccttccatcagacactcggcaaagaagccccctttgccgagtgcctcctagagctctcggcaaagaaggcttctttgtcgagtgtctagaaggacac

SEQ ID NO: 7069 - DNA, 76 bp, Zea mays
tgccagagatctggcactcgacaaagagtattttaaaattttaaaaaaatctttgccgagtgccagatcgcgggca

SEQ ID NO: 7070 - DNA, 134 bp, Zea mays
tgccagtacagtagacactcggcaaagagtgagtctttgccaagtgtccgtgtggcacttggcacagtttccgccgaggtcacctagcacctcgacggcgacttttctttgccgagtgccctacaaaaagtact

SEQ ID NO: 7071 - DNA, 180 bp, Zea mays
aaccactgccgccgcccatttcttcttcgaccggttgccgcctgcgcgcggcactgctcgtacgtctccccgccagtgcttactgtaatgcatgcatgcaggtccaggagtgctacgaggtctcagccgactacgagggcaaaggagacacgacgaagctgggcgagctcggcgccaagc

SEQ ID NO: 7072 - DNA, 237 bp, Zea mays
ttgaaggccgaagaggagaaaggttccatgtgaaggcatagcgcggtggcgtaagctgatcctaagggacgggggaacctgagaggataccgcgatcacgcgcgtcacccgaaagggaatcgggttaagatttcccgagccgggacgtggcgtcagacggcgacgttaggaagtccggagacgccggcgggggcctcgggaagagttatcttttctgcttaacggcccgccaaccct

SEQ ID NO: 7073 - DNA, 208 bp, Zea mays
tcgtcgcttcgcgtgttgtcgagcctgtcgttttccctgtcttgtgctcgcgcggtttccttgccagcgtgccctctcggctcgctcggctttaaaatccctatctcgtcgttgttccgcgcgacatcaagaaccccaagaatcggatgaagatgaagctagcagtgcgatatttcccaagcgctcgacaaattgcttggatcggaaa

SEQ ID NO: 7074 - DNA, 92 bp, Zea mays
gcggtaggctttttacatcacaggcggttcagatagaaaaccgcctgggatgtctcaggctattcggaccgcctgtgatgtattagtatcac

SEQ ID NO: 7075 - DNA, 189 bp, Zea mays
tttagagggtgtgtctggttttatggactaatttttaatcccttcattttattctattttagtctttaaattatcaaatacaaaataaaaatagtgttttagtttttatatttaataatttatggactaaaatagaataaaataaaataactaaaaattagtccctagaaaccaaacgtacctacagtt

SEQ ID NO: 7076 - DNA, 114 bp, Zea mays
gcaaagaacactttgccgagtgccagcaatctggcactcgacaagaatattttaatattttaaaaaatctttgccgagtgccaggtcgcgggcactcggcaaagacgtgtaaat

SEQ ID NO: 7077 - DNA, 73 bp, Zea mays
gcatgctgcacgtgacgtaagccaacgagcggagcctgattctgccacgtggcatgctgcacgtgacgtaagg

SEQ ID NO: 7078 - DNA, 111 bp, Zea mays
ttggttcatggctaaatgtgccacactttgcctaaggttagtcgttcgaattgaagaactaaccttagacacaaaagttaggcaaagtgtggcaagttagccatcacacca

SEQ ID NO: 7079 - DNA, 75 bp, Zea mays
gcctggactcgcgtagaggtcgcgacgagataggccctcgctgaactccctcgggatgactgcgtggtcgcgcca

SEQ ID NO: 7080 - DNA, 100 bp, Zea mays
agtgttctaggtgacactcggcaaagagattacctttgccgagtgtattaggtggcactcggcaaagagttttcctctttgccgagtgtccgcaagccta

SEQ ID NO: 7081 - DNA, 111 bp, Zea mays
ttggttcactacctcagttgccacatttgcctaacttttctgactaaggttagttatacaaataagaacgactaaccttaggcaaagtgtggcacatttagccacaaacca

SEQ ID NO: 7082 - DNA, 84 bp, Zea mays
agtgtggcgctggagtcggtggagacttgggggctggggtagacctgctcggagaagagttgcctactcctccagtgtaacact

SEQ ID NO: 7083 - DNA, 146 bp, Zea mays
ggacccacagaggccttgttcgtttctaccggatttgtggattggaacgattgctaaccggattgtttctctaatttatataaactttgattaggtgaaataattccgggtgcaatccgatagaaacgaacaagccctgaaccact

SEQ ID NO: 7084 - DNA, 145 bp, Zea mays
tgccgagtgcgtcctgtgccgagtgttcagcactcgataaagggtatctttgctgagagcctaaatttaccgagcgcggcactcggcaaagccttctttgccgagtgcccgataaaaagcactcggcaaagccgccggcactcgg

SEQ ID NO: 7085 - DNA, 73 bp, Zea mays
cggcgttgtggacggcgacagagtggacggaggcagcagaggaagtccgactcgcgtcaccgcgccagcgtcg

SEQ ID NO: 7086 - DNA, 127 bp, Zea mays
ggcaaagcgtgcttctttgccgagtgtccgggccattacactcggcaaagaacctataccggtgcccaggtcttggttctttgccgagtgctatggcctggacactcgacaaagaacctctttgccg

SEQ ID NO: 7087 - DNA, 242 bp, Zea mays
ccaactccagcagcactccgcatgcggctccgtatccctattttgcggagtctagcacactattcatcagtccagcaggctccgcatccggctccgtaaaacgcacggcctgtaccctgactccccatttccacgctttctctctcctctccgcagctctctgcgtgcgcgcgcggctgctcgcgggccccaggtgtcatagactgcatgcggagtgggatggggagtgttgctggaaacgg

SEQ ID NO: 7088 - DNA, 96 bp, Zea mays
agtgttggaaaaaagcactcggcaaagagctctttgccgagtgttatatttttgacactcggtaaagaagctctttatcgagtgttaaaaaaacta

SEQ ID NO: 7089 - DNA, 85 bp, Zea mays
tgacgctcggcataggcggctttgtcgagtgtctggctctcggcaccacatggcactcgacaaagcgccctacagctaacggtcg

SEQ ID NO: 7090 - DNA, 167 bp, Zea mays
aagtgatatcagagccgactctcgaggttacacagaaaatgtgtggactagggggttcgggtatatatggcgcatggcgcatgtgggcccggagtggtcacatggcatgacatatgacgacactagacacacagacgtggctaagaggggaggttcttatattgggg

SEQ ID NO: 7091 - DNA, 84 bp, Zea mays
tctcgacaaagacgtctttgccgagagcctttttatgtcgagactcgaaagtttggctctcggcaaagactctcttcgtcgagt

SEQ ID NO: 7092 - DNA, 84 bp, Zea mays
actcgacgaagagagtctttgccgagagccaaactttcgagtctcgacataaaaaggctctcggcaaagacgtctttgtcgaga

SEQ ID NO: 7093 - DNA, 94 bp, Zea mays
taggctctcgacaaagacgtctttgccgagagcctttttatgtcgagactcgaaagtttggctctcggcaaagactctcttcgtcgagtgcctt

SEQ ID NO: 7094 - DNA, 178 bp, Zea mays
tggtcgagccggaccaggtccagacgtctataaaagaaaatccatagtgctagggatcagtttttcacgcccatctcgattcattagcgacggtggttgcccgatagtgcgcgcggcgatggccgcggctccccaacctcgacatgcggtggcggtggttcctaggccggcgatggcg

SEQ ID NO: 7095 - DNA, 95 bp, Zea mays
caagcgagctgctaacttcctagaggcggtcgtaggaagttagcatggacaactaactttctacaacctcctctaggaagttagcttttagttgc

SEQ ID NO: 7096 - DNA, 96 bp, Zea mays
atggtttccgtcggcgtggctaaggttgtaagagacttgctttactttatgtgccgtgaagttctttatcaataagggctattctacaatacaaat

SEQ ID NO: 7097 - DNA, 76 bp, Zea mays
ttccatcctaaatcatcgcgtgcgttgactttgacagagcgtctgtttggtttgctttacgcgagaaatgctggct

SEQ ID NO: 7098 - DNA, 187 bp, Zea mays
tgccgccttcgccgagtgtttggcactcggcaaagattctttgccgagtgctattctgtgcgagagccctgctctcagtaaactcggtcgttaccgagagcgggactttgcggagtgcggtactcggtaaaggctttttttgccgagtgcccgacaaaaagcactcggcaaagcgccgagcactcga

SEQ ID NO: 7099 - DNA, 107 bp, Zea mays
gccgagtgctcggctgtgccgagtgtcctacactcggtaaactagctctttaccgagcgcaggacgttgccgagtgcggcactcggcaaagccggatttgccgagtg

SEQ ID NO: 7100 - DNA, 78 bp, Zea mays
gatcctagaaagctgccaggagtaagtacgctggtccagggaatggacggggtgttacaagtggtatcatagtcgacc

SEQ ID NO: 7101 - DNA, 249 bp, Zea mays
acactttagaccaacccagcgggtcccataaaggcatcccgcatgtttatatatatgagaccgcgatcactgttcatctcttcaacaagttgcagacgtcgatgcgaaaaacgggcatcccctctccatactgccataccccccaaatctagggtactctccctcctttccgtatctttcgagctcgtatataggagctgctgaaaccaactgccttttaggatgtgtttggttggggagccaactaga

SEQ ID NO: 7102 - DNA, 119 bp, Zea mays
agcactagatgacactcggcaaagactttggcgagtgcacgttgccgatgtacagttcactgagacctctttgctagagtcacactcgacaaagtctttaccgtgaattttctaggctt

SEQ ID NO: 7103 - DNA, 170 bp, Zea mays
tcatattatgtgttttgccgagtgcctcctaaagaactcggcaaagaacctggcaaaggaaacccgctggtggatccttttgccgagtgcataaaggtagacactcggcaaagaggtaactttctttgccgagtgtattaggagacactcggccaaggcgccgtctccgt

SEQ ID NO: 7104 - DNA, 147 bp, Zea mays
gtaaagagagagcctttgccgagtgtcaccaaatacgctcggcaaagggaaactctttgctgagtgtcagtacagtggacactcggtaaaggggaactctttgcccagtgttactctgtgggcactcggcataggctccgttgttgt

SEQ ID NO: 7105 - DNA, 120 bp, Zea mays
aaagtggccttaggcgagtcgtgactgcgcctgctacccgggcttggcctcggatgagtcgtgactgcgtctgctgcccgggcttggccttggatgagttgtgactgcctgtcccgcttg

SEQ ID NO: 7106 - DNA, 240 bp, Zea mays
cacacgaaataacttagggcttgtttgtttcctccggaatggctggcctgaataattcagggctggaatggttcactaatttatataatcttgataaggggacgttcggtttttccagaatggtggcccggaaccgttcctagcttggattgtttctctaatttgtataaattttgatcacttggaacgattcacggtgtattcttgaagaaacgaacaaggcctaagttggaacgattc

SEQ ID NO: 7107 - DNA, 75 bp, Zea mays
tgccaggtagcactcggcaaagaacccgctagggagggtccccatgtcaggttctttgtcgagtgctacctggca

SEQ ID NO: 7108 - DNA, 124 bp, Zea mays
tgttatgtccgacggctatactgacagccatcagagataaggcttacgtccgacgactattagtatagtcgtcggacataataataactaccgatggttgtcaatatagccgtcgaaataatag

SEQ ID NO: 7109 - DNA, 149 bp, Zea mays
tttattagttaataatggcagccatcttgcttgaggatacattccagcagttcttgctggtactgaagtgtacaagatgcttgggaatgcggaaactgactctaaactttgttttgttaagcacttgagcagccatattaggtagacga

SEQ ID NO: 7110 - DNA, 182 bp, Zea mays
ccccagaggtgtggccgggggcacgattggcataacgcccaccccccgcgctcacccctgactactgtataaagacatagtacccacgcggctatatttagtcgcgtgctctaaaagagctgtgtgtgggacaaggccatgactcgccccagcctcgggcgactactctgggccagcaacag

SEQ ID NO: 7111 - DNA, 131 bp, Zea mays
acacaacgtcagcaacgaccgtcgtcccagcacacaagaattcatggccggtaagtagcgacttatatggcaggccggttgggcttcagatggacgatgagctggacggcgtgattgcgctgtcgttggat

SEQ ID NO: 7112 - DNA, 254 bp, Zea mays
ggtcagtagcgacttacgtggcagcgttgcgcttcaggtggacaatgagtggagacgggctctgcgccgtcatcggatgcagtacccagaaacatcaaggggtcctctacgttggcgacgaccatgaggtccccctacttgacgatggacagcgcggtgcaggtgccgccgctctagaccacgtccaagtgacgactgcgccgaagcttgtcgtacacagcggcgcatgcggccacgtaggactgcttctagag

SEQ ID NO: 7113 - DNA, 98 bp, Zea mays
aaaataattcttatgtccgacggctttcagagaggccctctgacataagcttatgtccgacggccgaactgatagccgtcggatataaggttttttaa

SEQ ID NO: 7114 - DNA, 158 bp, Zea mays
ctcgtcgtcccttaaggccttgtttgtttgtgtcggattgatgggtcggaacgattccgagccggattgcttctctaatttatataaactttgattaaccggaacgattccggatgcaatccgatgtaaacgaacaaggcctaagccaactctcattg

SEQ ID NO: 7115 - DNA, 99 bp, Zea mays
gccggcttgcccatccctatgttggtagtgtctgacggcgctctagcgaaagctttgggtctctgcagacctacagcggcaggaatggcgtaaggctgg

SEQ ID NO: 7116 - DNA, 136 bp, Zea mays
tttacacatctcggtgccatagatcttggcgccgagctacctgccgctctgtcgtccaccatctgacgccatctaacgcggcgtcgatgtggcaccaagctcgacgccaagatctatggcgcatgagcttgaatgt

SEQ ID NO: 7117 - DNA, 161 bp, Zea mays
gagaagttttctcgggtgcgcatgagtaaggacaaagtgcgcacaaaagacaaaaaaatggtttatggggacggtctatggtcttagggggctactaggagtaagtaccgccggcccgagagtggacgtgttgttacaaatggtatcagagctgaccctcc

SEQ ID NO: 7118 - DNA, 112 bp, Zea mays
ttggttcaatacctcagttgccacattttgcctaacttttctacctaagtttagttattcaattcgaacgactaaccttaggcaaagtgtgacacatttaggcacaaaccaa

SEQ ID NO: 7119 - DNA, 185 bp, Zea mays
cgaagtaggctttgccgagtgccgccgtgacatggcacttggcaaagaagaacctcgtgggcccctttgctagttcatttgccgagtgcccgctggactagctcttagcaaaaggagcaccagcgggcccctttgttagttcctttgccgagtgcattaggaggcactcgactaaggttgcttct

SEQ ID NO: 7120 - DNA, 96 bp, Zea mays
gcaactaaaagctaacttcctagaggaggccgtaggaagttagctgtccatgcttattttttacggccgcctctaggaagttagcggctcgcttga

SEQ ID NO: 7121 - DNA, 181 bp, Zea mays
caagcgagccgctaacttcctagaggcggccgtaaaaaataagcatggacagctaacttcctacggcctcctctaggaagttagcttttagttgctgactaacttcatacggtcgactctaggaagttaactgcccatgctaacttcctacggcctcctctaggaagttagatttcagctt

SEQ ID NO: 7122 - DNA, 99 bp, Zea mays
cggttctttgccgagtgttgtgcggggcactcggcaaagccttcctctttgccgagtgccacgtccaccgcactcggcaaagaacctataccggtgtcc

SEQ ID NO: 7123 - DNA, 71 bp, Zea mays
tcgtatggcctcggttagacctgcaaccgagtgttcaacggcggtgtcatggttgttctgggcgccatgat

SEQ ID NO: 7124 - DNA, 85 bp, Zea mays
catcttggcaccagaggtgacgcagaggaggaccgacaacaatgaccactcgccatcgtcggggtagcttttgtgccggcctgcc

SEQ ID NO: 7125 - DNA, 103 bp, Zea mays
tcggttaaaatcctttacttccaacggccacctaggaaaccgtcggacataagcttatgtccgacggcttatcggacagccgtcggacataatggagccgtcg

SEQ ID NO: 7126 - DNA, 86 bp, Zea mays
gccttcgttccgtgaaaaccgaacggcaccttagggatgaaacgaacatgacctaaggccttgttcgtttctgctggattggtggg

SEQ ID NO: 7127 - DNA, 70 bp, Zea mays
tcccaaaggatcgagtcttctggtgtcttgtcttgtttgctgagcccggaggacttggaactttcttttg

SEQ ID NO: 7128 - DNA, 205 bp, Zea mays
gcccgtgatctggcactcggcaaagattttttttaattttaaaatatactttgcagagtgtcctcgatccggcactcggcaaagtcttctttgccgagtgtcccccgggcgacactcaacaaagactatttcactacactttgccgagtgtcaaccatttgaccctcggcaaaggcttctttgccgagtgtcatctctggacact

SEQ ID NO: 7129 - DNA, 164 bp, Zea mays
tatttcatgttttggacccttagctcggcgctatagcttatgacgccaagctaacacatgtcggcgtcataggttatgacgccgaactctgacgtggcgctgatgtggcttcctagtttggtgccacagatcttggcgctgagctaagaagtcctataaatcgg

SEQ ID NO: 7130 - DNA, 132 bp, Zea mays
ctcggcgaacggcggcgctcggcaaagggccgtcagcagccgtctatagctgacggctgttatctttgtcaagcgccgagctttggcacttggcaaagaaggcttctttgccgagtgtcccacgaccagagc

SEQ ID NO: 7131 - DNA, 108 bp, Zea mays
gcaaagcagcctttgccgagtgccagctggttgacactcggcaaagaattgtaaaattatctttgtcgtatttttcacccaggggacactcggcaaagtcgtctttgc

SEQ ID NO: 7132 - DNA, 106 bp, Zea mays
catcggacgtaatgttatatccgacggctatagacggccatcggacataaaagcttatgtccgacggctatcaaacagaccgtcggacataatcttaagtccgacg

SEQ ID NO: 7133 - DNA, 90 bp, Zea mays
aggccaatcccaggtgggagaggcagccagactcgcccaaggccaaccctgggcgggatacgcagtcacgactcgcctgaggccaactcc

SEQ ID NO: 7134 - DNA, 61 bp, Zea mays
aacaagatgtgtgatagtcttttggatgattgtcttgttacatacatcgagagggatattt

SEQ ID NO: 7135 - DNA, 95 bp, Zea mays
gagtccccgacgtcgccggcggcgtgaacgcgttccccccgcgatcctacggcggaggagagcccgagcagtcatcggacagcggccagatcaaa

SEQ ID NO: 7136 - DNA, 108 bp, Zea mays
gcaccggtaaagccttctttgccgagtgttgtggccttggcacttagcaaagaagcaagctttgccgagtgcctcccagagcactcggcaaagaaactgacaaagggc

SEQ ID NO: 7137 - DNA, 203 bp, Zea mays
acctttgtgcttggtcaaccaatccattcctaagatcacatcaatcccttgggatggcaagacagttaagtctgccaagaacactaccccacttaaaaggattctgacttaggagcatttgtgctggcatagaaggtctgaccctgaggtgcgggtgaccaagggaatctctagaggggtagaggggatgccatgctttttca

SEQ ID NO: 7138 - DNA, 156 bp, Zea mays
taaacttaaaagctcagctcaggagtgatccagcacgaccttacttgaacaggatctgttctataggatcgtaccgttgcatccttgattaataaggaggcaagcacttaagcctggttgatgtgtcatgacctttgggccagagcgtgattaacg

SEQ ID NO: 7139 - DNA, 94 bp, Zea mays
tcgcatcatgtcatcgtgccgagccacttcctctaacgtgaagtcggagctgctatgtcaggggatgtggctcggcaacgataacatgaggcga

SEQ ID NO: 7140 - DNA, 71 bp, Zea mays
ggcgagagcgacgtggcgcgatctgattggtctacgtgtcgcgatctgattggtccacgtgtgttagccgt

SEQ ID NO: 7141 - DNA, 152 bp, Zea mays
aatagaacccgccgtccacgccaggattttctgagtcttggaaacacttacaccgagacccctgctgtttcctggaattgatgccccgtccagagcgttataaatcaagactagttaagtgcccgtgcgttgcgacggcacgcaaattattc

SEQ ID NO: 7142 - DNA, 234 bp, Zea mays
tctatatacgtcaccctcctgtatcgtcatcgagcccatcgaaccccgttcttccctgctcaacctcgtcaaaccccgaatcccgaacgttaggcaaaaataagcgaagtccatgtgcatctcttatcaagtgctcgatcaaagacttcaatcgagggtcatcgtcgttccgtacgttatcaagaaatcccaagagatgggcgaagacgaagctagcagcgtgatattcgccaa

SEQ ID NO: 7143 - DNA, 71 bp, Zea mays
taacttcctagaggaggccgtagaaagttagctacccatgctaactttctacgaccgcctctaggaagtta

SEQ ID NO: 7144 - DNA, 161 bp, Zea mays
gagatctggcccgtgtgaagcagaccgcccgctgccgccgacggtacgtagcgatgccgtcctcttcctcttctgttgtcgatacaccgccggtcggcgcgtcattcgaggagacgctgagcaatgtggcggcggaggagttgcgcgccggcgacacagtg

SEQ ID NO: 7145 - DNA, 100 bp, Zea mays
gaaataaaacttatgtccgacggctttcctgctcccctccacggaaataagtttatgtccgacgggcgagctggtagccgtcggacataaggttttttaa

SEQ ID NO: 7146 - DNA, 76 bp, Zea mays
aaagcactttgggccaggctcaccaggtacgagtagattggtcgcatctccagagccaggctcccagtgaaacctg

SEQ ID NO: 7147 - DNA, 148 bp, Zea mays
gaagatgattaaggccttgttcgtttgcatcggattgcaccgaaatcgttccagctaatcaaattttatataaattagagaagcgatcctgttaggaatcgttccgacccaccaatccggcacaaacgaacaagaactaaatctttat

SEQ ID NO: 7148 - DNA, 69 bp, Zea mays
attatgcattccgtgtctatgactggtgggatcatctgtgtctatgatttatagacccgatggcatatt

SEQ ID NO: 7149 - DNA, 247 bp, Zea mays
gtctcgttacctgatgcggtctgggcactaaactacgactgagtgcagggcgactgggttcacccctttccgccttctatatggatcggaggccatgaccccacaagaaataaaacatgggtccccacagacagtcttgtcagctgtccccgacgtggacgaacccacttcgaaggatctcatctgtggcagaaccacccgaattattccagcttaagtgcctaagtcacgcctcaggggccgtaac

SEQ ID NO: 7150 - DNA, 233 bp, Zea mays
tcagtacagctgacactcggtaaagagggagcctttgccgaattcacgcggtgggcactcggcacaggctccgtcgccgtcacctggtgccgtgacggtgacttttctttgccgagcaccgggtgacactcggcaaagtatttaccgagtgcctggcaaaaagtactcgacatataagccgttgccgatgtacaattcgtcgagccttctttgccgagtgtcagacttggcaa

SEQ ID NO: 7151 - DNA, 201 bp, Zea mays
aattggaggcgatactggtgactgttgaataattagacaaattccaaattaaattccgaatataaatcatgaccaaatcagaagaactgaaataaaagccaaatcagatgatgcgtacgtgactctctgaatgtctgccttgttggcgcgcgccaggatcagatgccccttcgtcagcagatcacgagcagtcgcgtgaag

SEQ ID NO: 7152 - DNA, 181 bp, Zea mays
ttggccttgaccgcgggtccctccgccgtggccctagggggataatcttggcggcgaggggcctcaccagcggggtgctggttggcgatgttgtgtacctgctgctggctgcggccgtcccgaccgggttccgtctgtgaaggccttgtccacgtgcggctggactgtggagggtctttgg

SEQ ID NO: 7153 - DNA, 112 bp, Zea mays
ttggttcactacctcagttgccacactttgtctatcttttctgcctaaggttagttattcaattcgaacgactaacccttatgcaaagtgtggcacatttagccacaaaacc

SEQ ID NO: 7154 - DNA, 244 bp, Zea mays
gtccccttggatggctttgttggagaggtgagaaaagttgaggaagtcctggctggcgaggactctcttaagctcgggtcttagtcctttcagaaaacgggcaatcttcctgaactcggtgctgacatcgtcaggcgcgtaacgggccaactctgtgaacttgtgcacatactcactgactgttctcccaccttgagttagctcccgtatctcttcctccttgagttgaactatcccctggggt

SEQ ID NO: 7155 - DNA, 93 bp, Zea mays
gggtattgttgtgagccgtcgcaacgcacggggaaccgactagtatatacttactagtcagttgctcgtgctttgctacggttgttatatata

SEQ ID NO: 7156 - DNA, 179 bp, Zea mays
tggaaaatcacaaaagcccatataagtggatgactaaggaataggtggaaccaatagcaccatattgctagttctagtggagtagagctagcttaaatatggaagccaccactagtacagagaagttttatagtggcggttgtaatcttatttatagtggcgtttttcgtaaccgccag

SEQ ID NO: 7157 - DNA, 74 bp, Zea mays
acttcctacggctgactgtagcccctaggaagtttgctggctaacttcctacggcgcagttggcctctaggaag

SEQ ID NO: 7158 - DNA, 101 bp, Zea mays
cgccgagtatttctttaccgagggtttttgcgtggcactcggcaaagagttctttaccgagtgcccgaataaaacactcggcaaagagccaaattccggta

SEQ ID NO: 7159 - DNA, 81 bp, Zea mays
ctggaaaacgattaggtgctggctgctgctgaggtggcctgatcacccatctgcttgcctgctgctgaaatcctctgctct

SEQ ID NO: 7160 - DNA, 75 bp, Zea mays
tacccttgatgattagtgggttgtcgccagaaagaacggaagttgtatgttgcgtaaccagtgacatggtgggta

SEQ ID NO: 7161 - DNA, 69 bp, Zea mays
cacactcttgggagagctctgtgcgcggttcgtggcgaacttcgccagtgcttatcaacagcacggtgt

SEQ ID NO: 7162 - DNA, 156 bp, Zea mays
agggcgtgagcgtcgacatcttgtaacagaattatttagcacagtggcggacccaggaactgatgacagcctaggcgagaatacggtgtgatccccacgcctgtgctcgtgccacgtgctgcttgcttccgtacaatgtgctcgcgccttgccctc

SEQ ID NO: 7163 - DNA, 182 bp, Zea mays
caactatggcacagacacgtcatgccggcttgctaactgtatcgggccagcccgttagtccgccgatccatttaattaaatcagcgtaaaatgttaaaaaacggtgcatggggtgggattcaaacccatgccctgatggaagaagggcggaagacactgggtgaaactgtctaactagtaga

SEQ ID NO: 7164 - DNA, 204 bp, Zea mays
ccctattaggccttgttcggttacatgggatgaaatcccaccttggatttaatccggatatggattgagtgaatccatatctcacacctaatcccaccatggaattgggtgtgaggtatggattcacccaattcagacccagataaaatccatagtgggatttcatctcttgtaaccgaacaaggcctaaatgggatggcttta

SEQ ID NO: 7165 - DNA, 156 bp, Zea mays
actaagttgggtgtcaaaaacaggtggtggccttccggatcgtacttagggatttgcccgaacttccggtaaaggcaagtaaatacagtggtggttgcgtgggcgcagctatcatcttttaattgcacctattccctgtcattgagtatgcgataa

SEQ ID NO: 7166 - DNA, 92 bp, Zea mays
ttttaaaaaccgtgggtacccacgttctgaaattaagttcgtgggccctatcaaaaaccgtcgaacttaacctattatgaacgtgggtaccc

SEQ ID NO: 7167 - DNA, 120 bp, Zea mays
gaggggcacactcggcaaatactttggcgaggggcacactcggcaaaaactttgacgaggggttttagggtttggcgaggggcacacttggcaaagactttgccgaggggttttcagggt

SEQ ID NO: 7168 - DNA, 78 bp, Zea mays
catgaagcatagagtgactccataaaccaatcacaccataagggggtgcttggtttgaggaatcactccatccagaat

SEQ ID NO: 7169 - DNA, 132 bp, Zea mays
ctcggcaaagacgacctctttgtcgagtgctagcgacataacactcggcaaagaacctaagccggtgcccaggtctgtgctctttaccgagtgttatgacccagacactcggcaaagagtctctttgccgag

SEQ ID NO: 7170 - DNA, 116 bp, Zea mays
gagggccccagttgttgtcagactcccttccctagttttgcactctgacgcgcgggaccctacggtcaggctcatcttccctctttaggctgtctccagcaacgtccactaaattt

SEQ ID NO: 7171 - DNA, 211 bp, Zea mays
atttgaaataaagggtgcgtttggttgaatgtacaaagagggatggaatgagacgaccatgttttctatagtgtttgattgagagttaagcgggagcgaggtgaacaccgaagtgatttttgggggcgacgtgatcccaaaaaatcaaggggcgaaggcgcccccgactcatcctactttgacttcaaaccaaacatacccaaagagtagc

SEQ ID NO: 7172 - DNA, 105 bp, Zea mays
tcggcgcaatagatcttggcgccgagctacccgctgcgttgtcgtccaccagctaacgcggtgccgacgtggcaccgagctcggcgccaagatctatggcgccga

SEQ ID NO: 7173 - DNA, 172 bp, Zea mays
gagagcttgtatgaacttgtgagcgtctgagtgagcctaagattggatctgtcttgtaacgccgcatgcctccccttttatagctgaaggggggcatgagaaaaggtactgaaccccgatatgtgggcccagagacataatgaatatagcgcttggagacatacaaactttg

SEQ ID NO: 7174 - DNA, 146 bp, Zea mays
aaattgaaaaatacttggcgaagtctttgctgagtgacactcgacaaaaaaaaaactcggcaaactgtacatcgacaataacttctttgccgaatactttttatcgggcactcgacaaagactttgccgagtgtcagccggtactc

SEQ ID NO: 7175 - DNA, 98 bp, Zea mays
gggacaggagccgaccgtgcgcggcgcgcgcgcagagggcagccagtgcgcgaccgagcgcttgagcacgcgatcgaacacgtggaggtgtgtttctg

SEQ ID NO: 7176 - DNA, 126 bp, Zea mays
ggcctgtttggattgatgtctaacttgccgcactttgcctaacttttctagctaaggttagttattcaattcgaacgactaaccttaggcaaaatgtgacacagttagccacaaaccaaacatgct

SEQ ID NO: 7177 - DNA, 95 bp, Zea mays
tgttgtatttgtgacactcggcaaagagtcttttgccgagtgtcaaaaaaagacactcgggcaagaaactctttgccgagtgtccaaaaataaaa

SEQ ID NO: 7178 - DNA, 79 bp, Zea mays
aatcccgggaccctgttgtgagtggcccagaccccacacagaggggtccgggacccatccaaggggtccggttcgtgcc

SEQ ID NO: 7179 - DNA, 78 bp, Zea mays
gtgccatataaagcactcggcaaagaacctgacatggggacccgctgacggattttttgtcgagtgctggacggcaga

SEQ ID NO: 7180 - DNA, 173 bp, Zea mays
tagcccctatcacatcgaatgtttgaacctccgttcggggtattaaatatagtcgaattataaaactaatttctcagccgaagattaaaaagtgagacgaatctagtacagttggttgggtctatatttcatactcctatttgaaagtcaaacgcttgatatgacccgagcta

SEQ ID NO: 7181 - DNA, 237 bp, Zea mays
cagttccgtacccccccccccccccccaaaaaaaaaatcaacgcacgccgtacacgcatagcatataggcataaatctaaagagaccgcgcaaaaacacctgcatgtccaaaccagtcaactaatcacgcgattattgcagcgcaaaagcgcgaccccataggaaggacgacggaagcagccgcacaaagcaagcgaaagcagaggccatggcccatgggggggggggggggggggg

SEQ ID NO: 7182 - DNA, 159 bp, Zea mays
agttatccccgcagtccacggagttgtggaacgcgccaatggaaaaatttattctgtggtgcaatagatgctcctcgacgaaaaaagggtgccgggcgggatttgttacccgaggcggtctgggcgctaaacacgactgagtgcagtgcgaccgggttc

SEQ ID NO: 7183 - DNA, 114 bp, Zea mays
ctagctcggcgccaagatctatgacgctgatctactgccgtgtaggtgccaacgcagcagaggaagtccagcgcaccacgtagatcgacgtcatagattatggcaccgagccgt

SEQ ID NO: 7184 - DNA, 133 bp, Zea mays
gaggtaacacggctcggtgccataatctatgacgtcgatctacgtggtgcgctggacttcctctgctgcgttggcacctacacggcagtagatcagcgtcatagatcttggcgccgagctagcaattccttcc

SEQ ID NO: 7185 - DNA, 72 bp, Zea mays
aagaaaaagtcaagtccgactcaactttgcctccacctcggagtcaaggaccagtctgcactaaaacgaacg

SEQ ID NO: 7186 - DNA, 83 bp, Zea mays
tgaatttaggggaagctcctggagactgagaaaaaatagaggacagaatcttcagcagcgtcccctaaattcggtccgctaaa

SEQ ID NO: 7187 - DNA, 67 bp, Zea mays
gatttttttttttttttttttttttttttttttcgcgcgagagagagagacagacagacagagagag

SEQ ID NO: 7188 - DNA, 92 bp, Zea mays
gggttaggcgccatagatcttggcgcctaccccctgtacacgtggacatacggtttacagagatagactccaagatctatggcgcctacccc

SEQ ID NO: 7189 - DNA, 105 bp, Zea mays
ttgtttggggtaggcgccatagatcttggagtctatctctgtaaaccgtatgtccacgtgtacagggggtaggcgccaagatctatggcgcctaacccctttaaa

SEQ ID NO: 7190 - DNA, 176 bp, Zea mays
gaaggctccccacaagacgccggtactgtgtagcatccacctcctccgtcgcgctgtcgcgactcagcttcagcctctcctccatcggagtgagagctgggttgcattcggtgagcccagccagctcaacaatgcgcttggcgtaggcggtctggcgaagtgtgatcccggagtct

SEQ ID NO: 7191 - DNA, 115 bp, Zea mays
ttaccgaacgcaggactttgccgagtgcggcgctcgacaaagtgggctttgccgagtgcccgataaaaagcactcggcaaagacgccggcactcggcaaagagccgaattccggt

SEQ ID NO: 7192 - DNA, 120 bp, Zea mays
gttaagtcactttctttgccgagtgcccgcgatccggggctcggtaaagattttttttaaatttaaaaataaactttgttgagtgccggatcacgggcactcggcaaaggctgctttgcc

SEQ ID NO: 7193 - DNA, 203 bp, Zea mays
tccacatcctagcttggcaccaagatctgtggcaccgagctaggtgtcacgtcggttgccaccttgacccgtccacgccagtggagcaggcaccttggcaccatgggtcatcgcctagctttgtatcgttgttctctcttctcgatcgtagtgccacatcctatctcggcgccaagatctgtggcgccaagctaggtgtcacg

SEQ ID NO: 7194 - DNA, 195 bp, Zea mays
acacctagcttggcgccacagatcttggcgccgagataggatgtggcactacgatcgagaagagagaacaacgatacaaagctaggcgatgacccatggtgccaaggtgcctgctccactggcgtggacgggtcaaggtggcaaccgacgtgacacctagctcggtgccacagatcttggtgccaagctaggatg

SEQ ID NO: 7195 - DNA, 79 bp, Zea mays
caccagctgacgccgaatgccgtggtggccctggcaaaatatgtctgggcaacgacttcatacggcgggcaaccctcgg

SEQ ID NO: 7196 - DNA, 97 bp, Zea mays
gcctaggtatggggccgtcggacataagcgctattaccgagaagcccggtggcggccgtcggacataaggttatgtccgatgaccctgtacgaggcc

SEQ ID NO: 7197 - DNA, 178 bp, Zea mays
aatagggcagcctgaagggcgcggcactattaggtattagtgtcgtatagtgccggcacgacacgattagacactataatgttgtgtctgggccgctgattaggcactagtaccagcatagtacgacataattactaatagtgactaatagtgccgtgcctaatagtgctagtgctct

SEQ ID NO: 7198 - DNA, 121 bp, Zea mays
tggacttgatcggtagggacctggtcggccgttcggcctcgcagacttgcttgttgtggggacttgatcgatcgctgcgcatcgcggacttgctcgacaaggacctaatcggtcgctctgt

SEQ ID NO: 7199 - DNA, 240 bp, Zea mays
taggaatcgttccgacccaccaatccataacaaccgaacggcgccttagtgttttgtgtttgctaggtttattggttgtagaaacacagatcgagtttggttactccctagtgagttgcttctttcattatatttatgtttctttcattcactatagcatccctgatttttgccattaaaaagattgtctcgttgattatgattgccactaagtctatgaattgtgggtccatctgagtc

SEQ ID NO: 7200 - DNA, 97 bp, Zea mays
atatacctcccaagttattgggcccacatgcttctgcccttgtctccagactcttgttattgggtccgcatgtgcaccagataacttaacaggatcc

SEQ ID NO: 7201 - DNA, 163 bp, Zea mays
gagcaacgctctggcatgtgtctgggaagcggtgcccgatgaaggtaatttggaaaggagggtggtttgggtagttccggctttctcccaggtagactgccatagagcacttttccattccattttcacggtactccttccagacatattcgggcttcttgcg

SEQ ID NO: 7202 - DNA, 159 bp, Zea mays
agatggatatgtaagtgaatcagataacttacccgggtaccgaaccatttggattatgaatccgagtggattctaaacagagtaaatatggcacgagtgaccgctgacaggtggtgtcacaacccaaccaagttattgggcccacgtacattaattctt

SEQ ID NO: 7203 - DNA, 185 bp, Zea mays
gtcggacatacgcttatgtccgacggccagggggcgaaccgtcggacataagcgtttgtccgacggccagtcgtacagccgtcggctatatattgctattttcgacggccgctgctggccgtcggacataaccttatgtccgacggttgcctacggggccgtcggacataagacgaccgtcggaa

SEQ ID NO: 7204 - DNA, 172 bp, Zea mays
gtcgctaatgaatcggggtggagcgtaaaaaactgaaccctagcacttcgggtcctgttttatagacgtccggacctggtccgactcgaccggattgcaccgtccggcctgagcttcctctctctctctttatatatatatatagtttgcgccacacccacgtaccaacaat

SEQ ID NO: 7205 - DNA, 82 bp, Zea mays
acttgatgcttccaatcaggatctcggtagaagtcgggacattaacgaccactcgcgcgaggtcaggaattgattgtattca

SEQ ID NO: 7206 - DNA, 94 bp, Zea mays
cggccccacgggtatactggcccattctgagcccaacttacgcgtggaaactcgcccgaccttcagacgtagggcggctatccccgagtcccga

SEQ ID NO: 7207 - DNA, 164 bp, Zea mays
gatcggaaattgaagcagccggccagccgcccggccaccagcggcccgggaacagtcagcagtggtggtgcctgcctacccggcctgcagcgcacacacgctagcttgctctctcacgcacgccactccgatggagctgagctggttcctgtcagctttcctct

SEQ ID NO: 7208 - DNA, 99 bp, Zea mays
attatcttcccaagttattgggtccacatgtactctgcccttgtctcaaagacccttgttattgggtccgcatgtgcaccagataacttaacaggatcc

SEQ ID NO: 7209 - DNA, 104 bp, Zea mays
cggcttggcgggggccgtcggacataaggctctattatgtccgacgacctgagtgaagccgtcagacataagaaagtcttatgtctaatggccccgctaagccg

SEQ ID NO: 7210 - DNA, 106 bp, Zea mays
tagtctggagaggcgtcctcagcgacggactcgggctcaagttctctggaaagggacgcctgggagggtgagagctccgtccgggctcgggaccctgtcgcaccac

SEQ ID NO: 7211 - DNA, 194 bp, Zea mays
actagctggatgcccgtgcgttgcaacgagaatatataataccagtatactacgataacttatatacaaaatctatgttatatttttatgagaaaatgtttcataatcaatttgtgatcctagacatacataaattttgttattttaatctagttatttcaccactacattgcaaccatcagtatcatgcagac

SEQ ID NO: 7212 - DNA, 82 bp, Zea mays
atcctgtgccgagtgtccagtactcggtaaagaggctctttgtcgagagcctaactttaccgagtgcggctctcggcaaagc

SEQ ID NO: 7213 - DNA, 168 bp, Zea mays
ttaatgtttagttcgcctctgtgtctttgtatatcttgtgctactttgtgctcctttcattatattcatacatacgcatatggcatctcatttaggatcgagagatgacgatcgtgcaagtgatgtggtgccaaccacaagatgcagttggtggacgacctgaagaat

SEQ ID NO: 7214 - DNA, 148 bp, Zea mays
aaggacatgtccaagaggaggaccaggagcaggcttcagaggctgctattgaggatctccccccattcccccagcaattgaaggcaagccccggttttatgcataaccgtattattatatgctacttttctatctcttaatgcttgta

SEQ ID NO: 7215 - DNA, 197 bp, Zea mays
tgtactgagccctgacatgtgggcccatgaacatatcagatgtattacttgtctcaactaatgttcgctgctggagcaatcttcttgcgtcatgacatccgagatctgtgtagtattggcgtgcacgggaagcttctcgtataagtgatgatggatacagtgcaccgcgctgcatgggcgcactgtttgacaatggt

SEQ ID NO: 7216 - DNA, 82 bp, Zea mays
cgagctcgtcgccgtttgcccgtgcgcagcgagtccgcggccgcccactccctctgccaccgtagaccggccagtggagcca

SEQ ID NO: 7217 - DNA, 167 bp, Zea mays
aaaacaaaaatcccgtaagggccctgtttctttcttcaggatgaacctggatttcattcccagctcatcaaaatttatataaaatagagaagtaatccggctaggaactattccaaggctccaatccgtgaaatccgaacagggcctaaggggagtcgaaacctaga

SEQ ID NO: 7218 - DNA, 94 bp, Zea mays
cgcacgcagggcctcggtttgctgcgtggactgtctatgcatttcctacagagtgtaatggaacccagctcagctccgccgagccaaaaggaaa

SEQ ID NO: 7219 - DNA, 101 bp, Zea mays
ccaccgggttggacggtcgagtgggatggagcacgaggagtagtgggctaggccttgcccaattcctcgataccgacgacatcgattatccgctgcacttt

SEQ ID NO: 7220 - DNA, 80 bp, Zea mays
tagattgcaatctcgtcgatggagagtacgtgctcatccctgagcaaggagctgtccacgaggaagaccaggagcaagct

SEQ ID NO: 7221 - DNA, 88 bp, Zea mays
ggcccactggtgccccctttgccgagagctagtccaacaggcagttggcaatgagggagcactcggcaaagggaccgacaaaggggct

SEQ ID NO: 7222 - DNA, 84 bp, Zea mays
cgagtccagggctggaaggcactcgtattctctcgccctttttggactgacgtctggtgcgggtgcctctcggtttggagctgc

SEQ ID NO: 7223 - DNA, 124 bp, Zea mays
agttttatttgtcaggttgcactagttatcgttgcttgtagcaagttatcttggcttcttcgaagctagttatctgaagattgatcctacgtcgtgaagatcgggcatcgtgacacatcatctg

SEQ ID NO: 7224 - DNA, 144 bp, Zea mays
cggaaacaacttctttactgagtgtctgaagcactcggcaaagcctgaaaaacactcgacaaagaaggctcggcgaactgtacatcagtaacgtcttctttatcgagtacttttatcgggcactcggcaaagaaaagtcgttgt

SEQ ID NO: 7225 - DNA, 100 bp, Zea mays
agggctgtcagagcggccgtcggacataagcttatgtccgacggctgtcaggtagaccgtcggacataagcttatgtccgacggtcttctagtgggccgt

SEQ ID NO: 7226 - DNA, 123 bp, Zea mays
ctactatctatccaacattgtttctatcaaattttacttggaaaatcgatggtatttatattttattgattcctctgtgtttttacagcctccgataccagctgtggcggaactgcccgactt

SEQ ID NO: 7227 - DNA, 106 bp, Zea mays
gaaaaaacaaatattttttgtcgagtgtcaaggaaatacactcggcaaaacaactatttgacgagtgtttgccaggtgacactcgacaaagaatataatttgccga

SEQ ID NO: 7228 - DNA, 196 bp, Zea mays
ttaggatgcgttggttgcaatgacaggacaggacaggatgggacgatccctcaaataaggttgtttggtttaggatcaagggttgggacaagactatcccaatgttgtctccagttatccctcaaaattggagggacgagagaggacgccaagagacgtccttgtcctggttgtcctgcaaccaaacgcacaatta

SEQ ID NO: 7229 - DNA, 78 bp, Zea mays
ttacctggaccgttgcagcgatggcggccagatctggagtccaaaacggcggccgctgtcgccggagccgtgggtggg

SEQ ID NO: 7230 - DNA, 81 bp, Zea mays
tcgatggcaggttctggtgctggatcttgggctacctcctgaggaactccttgctccggcacgaggatgtactctccgtca

SEQ ID NO: 7231 - DNA, 138 bp, Zea mays
ttggatacgcgcttggatcacgtctctgtggatgcaagaaaagatgtataatttggctatgattgcaccagcacatccaggccctgtttgttccgtacaggcaagcaaacacaggatgaggtctggtcaatgcatgta

SEQ ID NO: 7232 - DNA, 150 bp, Zea mays
tgaagcttttagggcatgtttggttcgttacctcaattgccacactttgtccaacttttctgcctaaggttagttattcaattcgaacgactaaccttaggcaaagtgagcagttagccacaaaccaaacaagcccttactctgttttaa

SEQ ID NO: 7233 - DNA, 81 bp, Zea mays
tgccattgcatgagctcggcctgcacgaggagctacgtgtttggcggccgtctcggacgggcctggctgcgggtgatattt

SEQ ID NO: 7234 - DNA, 100 bp, Zea mays
gtgctctacagctagcactcggcaaaggcgacttttgccgagtgcctgagatccagcactcgggaaaaggcgactttgccgagtgctagctgtagagcac

SEQ ID NO: 7235 - DNA, 100 bp, Zea mays
gtgctctacagctagcactcggcaaagtcgccttttcccgagtgctggatctcaggcactcggcaaaagtcgcctttgccgagtgctagctgtagagcac

SEQ ID NO: 7236 - DNA, 140 bp, Zea mays
gcgcgtggatctgggatttggacgttgttgcccctagtaattgcacaaaaaaagatgcatttaagaggaattgaacttgagacctccagtctagaatgctttggaactgctgcagcaaccaatcaagcctgattgtttta

SEQ ID NO: 7237 - DNA, 120 bp, Zea mays
aagaatacatgaagctgctgggtggcgaagcggaccttggccacattggaacaacctccattaagtagtgggaatttggataccaccaccctgagccacacatcagcatcaagtgggtcc

SEQ ID NO: 7238 - DNA, 168 bp, Zea mays
atatagagtacgttgctgggcgcgttgaggacgtgtctgaaccctatattaagggtaccggacggtttaccgtcccttgctggacacaacctaaatggtttaccaagacaaattttaattattcggcatcaaaataactctccaacaggctagctaacttactcacca

SEQ ID NO: 7239 - DNA, 175 bp, Zea mays
acacataacatggctcacacggttacaccacatgggatcatccttcttctcagcacgcaagagtcccaagggaaaataagacatctccaggggatggtagccacagaaagtcgtcagagtcttcatggctgctgcttcaacggtgtcgtccgtcctgagtccaatcgtctcagag

SEQ ID NO: 7240 - DNA, 173 bp, Zea mays
cactactaggtgagtgctcgtgcgtcacaggcccgagtttctcttcaacgtcatcccgacggctcgtggatgtcgtcctccatctcataacagtataacacacatttgtatatataagttatcgagctattatatgatcccgttgcaacgcacgggcactgagctagttatcc

SEQ ID NO: 7241 - DNA, 177 bp, Zea mays
tcggaaacgggccctttgccgagtgcccgaaacactcggcaaagctttaaaaacactcgtcaaaagctttgccgagtgtgacactcgacaaacaaggctcgacaaacagtacatcgacaaagtcttctttgccgagtactttttctcaggcactcggcaaagaggcttgccgagtgc

SEQ ID NO: 7242 - DNA, 108 bp, Zea mays
tttggtgacagcaaacgaccttcgggctggggacgtctgcgagcttgttaaggggccagacgatggtgagccgatgtactatgtccggatgtgtgcgcttctcttctc

SEQ ID NO: 7243 - DNA, 119 bp, Zea mays
ctttttgagccagcacgagcacgacccgaaaacaagagcccaaagcacggcccggcacaaaataatatgggccgagctagcacggctcgaagacgggtctaggtcgggcctcaaattcc

SEQ ID NO: 7244 - DNA, 132 bp, Zea mays
cagccaccgcggttggtcacctggctgctctgatccgtcagtcaagactcagcactcgcccttcaccactcccggtccatcagcacgagcccacatgaccttcacctcagccatcgaccaccgttcctgtgc

SEQ ID NO: 7245 - DNA, 118 bp, Zea mays
cgacaaagacttctttgccgagtgccggatctagagcactcggcaaagcatattttaaattttaaaaaaatatttgccgagtgccagatcgagagcacttggcaaagacgttacatat

SEQ ID NO: 7246 - DNA, 175 bp, Zea mays
cagaatctcgctctttgccgagtgccagatgatttgacgagtgctttttttcgagcactcgacaaacaagttctttgtctagtgctaaacaaaaaacgctcggtaaaaaacactcggcaaagagtttctttgccgagtgttttatttttgacacccggtaaagagcttctttgct

SEQ ID NO: 7247 - DNA, 138 bp, Zea mays
ttagacttagtgggccgttcgcgtatggtggcaggtggcagcccagtactctatactgtacctgagttgttgaacgggccggtttaaaggcccggtcaataacgggccgtgctcgggctagcccaacgggctcaaatg

SEQ ID NO: 7248 - DNA, 116 bp, Zea mays
gcaggaactctgcaggcacgcacctcacatctgcgcgcgtgcaagtaaatgacagaaaaatcacatacactacatctgcgcgtacaagctgagctcgtgctatgcagttaaccctc

SEQ ID NO: 7249 - DNA, 247 bp, Zea mays
ggggcctctacgcccgtagcggtggcctccaaaaggccccctacgcgttgcagcgttaggggaggccgcgccgctcctcagatcaaggggagcactgttacacctcattgcatattgctcctctattcaatatttaaaaaaatagtaataaaagatgaatagagttagataataatattttatagttgtagtggggtatatatagggaataatataggggaaccgctgcgggagatgaaaagttagg

SEQ ID NO: 7250 - DNA, 140 bp, Zea mays
agagagtaggtgcgtttggttgcgggtcagctaggacaggaacgtcccctgacgttctctcttgtccctccaattttgagggacaacactgggatagttctgtctcaacccttgacccagaaccaaacaacctaatttga

SEQ ID NO: 7251 - DNA, 167 bp, Zea mays
tactaggtgagtgctcgtgcgtcacaggcccgagtttctcttcaatgtcatcccggacggatcgtggatgtcatcctccatctcataacagtataacacacatttgtatatataagttatcgagctattatatgactctgttgcaacgcacgggcactgacctagtt

SEQ ID NO: 7252 - DNA, 78 bp, Zea mays
cgctacatatgcacgtctatttggtctttgtttgcgttaaacgtagtcgaactcgaggtggcgccgctacctgtagcg

SEQ ID NO: 7253 - DNA, 83 bp, Zea mays
gctatgaaagtcggcgtcgtcgtgctcagggaggctggcgtcgttgcgggcaaggagcccgacgtctgctcgacgatggaggg

SEQ ID NO: 7254 - DNA, 188 bp, Zea mays
ttgctgacggttctttgccgagtgccgtgtttcgccgagagcttgacattcggcaaagactcctttgccgagtgtctttctatgccgagtgttttaccctcggtaaactaggtctgtgtcgagagtcttagttcgcaaaaagtggcactcgataaagcgccgagcactcgccaaagaacctgattgcg

SEQ ID NO: 7255 - DNA, 221 bp, Zea mays
aaatgtagcaaagcacgagcaactggctagttaatgatgatgttctatccaaatcattctctggctttctgtccttcaacatggcaagggtatatatcctattttatccaaaaagcttatttgtcaaggtactgttactagatcaagagcaagtgaattgtccaggtttctatgtatgggatatcaaggtacgactttgtcagttgtcgtggactcgtggt

SEQ ID NO: 7256 - DNA, 81 bp, Zea mays
ggttgtcgatgttccaggagtgctccaggtcctcgccatttggcgttgtgagcctgtaggcgctgggggaagcttttgttt

SEQ ID NO: 7257 - DNA, 95 bp, Zea mays
cgagtgtcacctgggacactcggtaaagacgctgtctccgtcacccgacgccgtaacagctgtttttctttgccgagtgcacgagaaaaagtact

SEQ ID NO: 7258 - DNA, 100 bp, Zea mays
cccccctctcccttaaccagtagccgcagcggagaaaagggcggaggggcttcccgccggcgatattgctccggtgaagtggtcgaggacgaaggggagg

SEQ ID NO: 7259 - DNA, 81 bp, Zea mays
gcggcggcgcggcgattccacggctaggttcacgttcacgacttcacgagctgggctatgcctgtgatcctgtgccggctc

SEQ ID NO: 7260 - DNA, 156 bp, Zea mays
agccaaatctcgggcactcggcaaagatctgatttgctgagtgttgctctcggcaaacaggaacacctgacaaatacaacctttaccgagagacaaatgctcgacataaaaatacactcgacaaagatatctttgccgagtgtccgactctcgaca

SEQ ID NO: 7261 - DNA, 198 bp, Zea mays
aggaggctgccgaggctgaggccgagctgctccgggctcaacttgccgagtccgatggtcgcgtggttggtaaggcccttaccccttgttccttgtcgtcctcggcatctcccttacttttatcgttttttacgacaactttggaagtcgaactggaggagctacgctgctgcttgggtcgggccttggacttcgtcg

SEQ ID NO: 7262 - DNA, 146 bp, Zea mays
tctcgtagcaagcaaaacgcttaggcccctcctctctttaggatttagggcgggtgcaatccgccacctggccggggagatttcctccccgacatttggcgcgtcaggtaggggggctaggcttcaagtttttgttagctacctgt

SEQ ID NO: 7263 - DNA, 136 bp, Zea mays
tcgacaatttgacactcggcaaagaagctttttgccgagtgttatatttttgacactcggcaaagaagctttttgacgagtgttaaaaataaaacactcaaggaaagagcttctttgctgagtgttttcttttacc

SEQ ID NO: 7264 - DNA, 143 bp, Zea mays
gcgcaagagtgaggacaaagtgcgcacaaaagactcgtgttggtctgtgaggacaatatatgatcctaaagagctgtcaggagtaagtatccctggtccaaggattggacggggtgtgttacattgatcactcctctttacct

SEQ ID NO: 7265 - DNA, 156 bp, Zea mays
atttagagccgaccctcgcggtttcacgggcgtgtgtgggttagggggttcgggtatatggcgcatggcgcatgtggggcccagagtgggtcacatggcatgggcatatgaccgacacctagacacacagacgtgggctaagaggggagggttcct

SEQ ID NO: 7266 - DNA, 90 bp, Zea mays
gacttcttcttcgtccgctgcgaatgcgctgttgggcgaatcgtcatccgaggataccatgagcgatttggcggcggtggagttacacct

SEQ ID NO: 7267 - DNA, 176 bp, Zea mays
ggaactccaagcagcggtgcggcttcaggcggcagcgcgaggttttctgtctcgccgccaggtacagtcccttcgtggatataagcaccttattgtggcctccagggccaccccatggccatcatcacatgagcaagtcgtggtgcgcctgcaagccgcagtgtgcgtcttccttg

SEQ ID NO: 7268 - DNA, 117 bp, Zea mays
cggaattcggctctttgccgagtgccaaatgttttgtcgagtattttttcggtcactcggcaaaaaaacttttgccgagtgttttatttttgacactcggcaaagagttttttaccg

SEQ ID NO: 7269 - DNA, 163 bp, Zea mays
actgtcgtcttgctgggttgctcggcgagcaggttggtcgacagccccacctcgctgggttgcttggcgaacagattggtcggtagccccgcctcgttgggttgatcggtggtcaggttggtcggccgccccgcctcgctgggttgctcagcagtatttgttc

SEQ ID NO: 7270 - DNA, 100 bp, Zea mays
gtgtttttttcaggcactcggcaaagaagttctctattgagtgtaaaaacagtcggcaaaatttgttggcaacatttgtttgttgagtgtactttttcga

SEQ ID NO: 7271 - DNA, 158 bp, Zea mays
gaccgtccaacccggtggcagggtggtaggccaagtcacaccgtctatcatttcctgaatggtacctgcaaaattgtgccacaagcaaggctgagtatactaatactcagctagacttaaccggtgtgaggagtctacttcctctacctctagactat

SEQ ID NO: 7272 - DNA, 84 bp, Zea mays
gtcgaagcagtggacggggggtgggtgggggcggcctcgcagctggacatggccaccacctgctgcttgaccgactgccagcta

SEQ ID NO: 7273 - DNA, 154 bp, Zea mays
ggccgtcggacatacggttatgtccgacggctgtcacacgggccgtcggacataagcttatgtccgacggctagtctgacacccgtcgacgtatttattattattttcgacggcagtccttggcacgtcggacataaccttatgtccgacagga

SEQ ID NO: 7274 - DNA, 157 bp, Zea mays
gggcggcatgcctcgtgtcaagcggtcagacacgtctgtgaatttaggaaaacaacatctccaaacatccgcatagtcttcgggccacgattggcccttttagaaattggtatgttgacatgtgattgtactgacccttgccaccggcgcaccccga

SEQ ID NO: 7275 - DNA, 85 bp, Zea mays
tgggtccaaggctaggaagacactcgcattctctcacccttctcggactgatgcctggtgcgggtgcctcttggtttagagctgc

SEQ ID NO: 7276 - DNA, 108 bp, Zea mays
tttccccgtcgcggtctctacggtccaaggtgacctccacggtctgcgccgccaccattcgctctgcctccatggtctccacggtctgagccgccagcatcgaggggg

SEQ ID NO: 7277 - DNA, 92 bp, Zea mays
gaaccagatcgccgtgatttggtcggcacacccgccgccgacgaggacaccctcctgcgcacgtggaccgagcgattccggccatccccgcc

SEQ ID NO: 7278 - DNA, 85 bp, Zea mays
ggttgtcgatgttccaggagtgctccaagtcctcaccgcttggcctttgtgagccttgtaagcactgtggggaacttttgtcttg

SEQ ID NO: 7279 - DNA, 153 bp, Zea mays
acggacagacgacgacgacgacgacgcgccccggcacggttggtctcgtgcggctggctaccgaagctagctagtaggtccgtgggttgggttccagtcggacatgccgacatgggagccgggagggcttcgtcgtcttttgcgttgcattgc

SEQ ID NO: 7280 - DNA, 227 bp, Zea mays
cgactaatatgcaaacaaccattaggtgcaagcagacatcttatcctgttagatatagatccaactgtagatgttataccttgttgttatgttttttattatgaagctacactaggtgatggtggaagggtttaattgctaaatataacacgcagtttgatctagatctaacgaaccaggatacctgcttgcacgcttgcacctaatggttgcttgcatattagtgg

SEQ ID NO: 7281 - DNA, 79 bp, Zea mays
agaggggttgtgtttccgcgcatgcaggctacccagtgaaaaaacaccaacgctgcatgtgcgggagcaggcggtagag

SEQ ID NO: 7282 - DNA, 84 bp, Zea mays
gcgggtggtatcgcctcgctctcgcccgcgctggagtgcccttccgggcgagaggcgggcgagagggaggcgaggcactggcgg

SEQ ID NO: 7283 - DNA, 86 bp, Zea mays
cgccagtgcctcgcctccctctcgcccgcctctcgcccggaagggcactccagcgcgggcgagagcgaggcgataccacccgctct

SEQ ID NO: 7284 - DNA, 94 bp, Zea mays
tcgatttgggtctgtatctgagttttttgattttactgactctgggagctcggttgagtggagtgaggagtcgtcggaggaggacttggattat

SEQ ID NO: 7285 - DNA, 179 bp, Zea mays
gcagggataagtcttcgtggtgaggtcattcatgtgtcacgggtgataaccaacagagccatggtgtagtgattgcgaggaaccgttcgctcggtgccttggatcatcaacgtcgagatctccattcaatcaaattatcgcatctcacggaagatcgggccgcgtctactatcactttc

SEQ ID NO: 7286 - DNA, 131 bp, Zea mays
gctgctcgttgtctgccattcaagctggttccatcgataaagggatatactgttagtgtgatatatcacttcttctgtagtgtatccctccatgattgaaccctctgggtgagcgcgatttcgcacataac

SEQ ID NO: 7287 - DNA, 118 bp, Zea mays
gtacgcgaacgtcggatagttcgatcatgcgctagaccttatggaggagacgaagtgaagcccaaggaaggaagagaattttaccgcctgattggatgaccgcacccacgtgtataat

SEQ ID NO: 7288 - DNA, 239 bp, Zea mays
ctgacatggtaggggcgagagtggaggcgagagctgacatggtaggggcgagagggaggctgtacactggactcagcctaagtgctcgcgcctccaccggagaacgctcaagcgctagctggcttccgctagcccgctccaccactaggacgaagctccactacttcaggcttcaacccaccatcgactcgtcgtgccctcggtgctgccctcgcccgcctcgcgccccctgacccagg

SEQ ID NO: 7289 - DNA, 143 bp, Zea mays
tctgctgccgctacgccgccgattgacgcgtcatctgaggacacgctgagcactgtggcggcgaaggagctgcgcgccggcgacacggtggatttcggtgtgtcgcggatgtcctcggtccgcgtgcaagatatgcagcagct

SEQ ID NO: 7290 - DNA, 113 bp, Zea mays
ctgcacccttaggcgacttttgctcggacgcatcttcgttgaaggcttctctccctgtaaatagtatcgtgcacttattgtgcttctgtccggctgaatcccttaggtgactt

SEQ ID NO: 7291 - DNA, 169 bp, Zea mays
actatcgtatttaaggcatgtttggttcgttacctcaattgccatattttacctaacttttctgcctaaggttagttattcaatttgaacgactaaccttaggcagaaaagttaggcaaaatgtgacaattgaggtagtgaaccaaacaggcccttagtcataaaccaa

SEQ ID NO: 7292 - DNA, 138 bp, Zea mays
attaagagatggactaggcaggcttttgcttcgggaggcagtgtcttgtcttccctcattgacgtcgaactccgtggtatccctgctcacctttggggactggagacagcggaggttttgcttggtccatactgcctg

SEQ ID NO: 7293 - DNA, 119 bp, Zea mays
ggcagtccttacaagccccgactcttcgctacccctgttgctctatgttgcggcttcgccacatgcggtcagcgcggcactggtgcaggagcagacagttgagggcgtgatcaggcagt

SEQ ID NO: 7294 - DNA, 107 bp, Zea mays
tctttgccgtgtgtctgagacacacggcaaaggctattttacactcggcaaatgctttgccgagtgtaacatagcctttgcagtgtgtctcagacacacggtaaaga

SEQ ID NO: 7295 - DNA, 169 bp, Zea mays
gaatgcgggtaactgttgttcctttgctgtgagccaggctatgcgcgtgcgagatctgtgtttggttgcctgcatgcagatttggatccaagctcgcacgatcctcaaagcaccatgagccaggctcaccagatacgagcagattggtcgcatctctagagccagcctt

SEQ ID NO: 7296 - DNA, 117 bp, Zea mays
cactgttcatcaccctaaacactgtgctgtgggtccacgattaattgttagtagataaaaaattgatagttgatatagaaaatgacattttatagttgtagtggggtataggggagt

SEQ ID NO: 7297 - DNA, 72 bp, Zea mays
acatcattggatcattggcgggtggctgagagtctgacaagagactgactttccttggtggtctgtgagaag

SEQ ID NO: 7298 - DNA, 94 bp, Zea mays
agggggctcaccagcggggtgctggttgggcgatgttgtggaacctgctgctgattgcggctatccccgaccggagtctggctgcgaagtcctc

SEQ ID NO: 7299 - DNA, 79 bp, Zea mays
ctggtggttgggcgcgcaggctgcgagttgctgcagcgatgagctgatcagcaagtgcagcttccgcaccacccgccta

SEQ ID NO: 7300 - DNA, 82 bp, Zea mays
aatgtcacgtggggagtttggctggggcggcacatctgttaaaagataacgcaagtgtcctaagatgagctcaacgagaaca

SEQ ID NO: 7301 - DNA, 78 bp, Zea mays
taaaaccgtcggacataggttgatgccgtcggacataggttatctccgacggttcaatccttatgtccgacggctttg

SEQ ID NO: 7302 - DNA, 97 bp, Zea mays
tggcaggcggcgccagggccaccctgcagatggcgcacctgtccagtccgttgccgaaacagtgcgcctatgctgcgcggtgcactgtactcatccc

SEQ ID NO: 7303 - DNA, 76 bp, Zea mays
ggcgcgccgcctgacaagcgatgtgccgcctcggcatttaatgaggcctgcccactctgctgttaggcggcgacct

SEQ ID NO: 7304 - DNA, 74 bp, Zea mays
acaagcggatttgttacccgtaggcagtctaggcactaaacatgactgagtgcagggcgaccagatttaccccc

SEQ ID NO: 7305 - DNA, 212 bp, Zea mays
gcaacgtcgactggattaaagccgcagcgaacatgatgcattcatttttatttatcaatcagaatagcaaatcaaatagcgtacttggttattactccctccaaaaaattttagttgatgtatgttagtgtaaaaatatactacacagcgtcaaataataaaaacggaggtagtattatttttatttgttaggctttactccgtatctattc

SEQ ID NO: 7306 - DNA, 80 bp, Zea mays
agtcttgcctcgctgggttactcagcgggcaggttgctcgggcagccctgcctcgctgggttgctcagcgggcaggttgg

SEQ ID NO: 7307 - DNA, 103 bp, Zea mays
gacatgccccgatgagtaggagggcgcggcggccgccgcaaaacccggggggcgagccctaggagaacggccgtcggtgcagatcttggtgatagtaattgtt

SEQ ID NO: 7308 - DNA, 126 bp, Zea mays
ggtaaagaatctttttgccgagtaccaagcaaaaaaccctcagtaaaaaaaaatactcgacaaagaaaatctttgtctcttagccgagtgttttatttttgacactcggcaaaaagtttctttgcc

SEQ ID NO: 7309 - DNA, 165 bp, Zea mays
gcgctggactctcatgtgcgctgacgcctatgtggccgagctcggcgctatgaatcatggcgctgagctgctatctccagccgacgagttttccttgcttctgaatttgtacgtgacaggggtaaaaacgttcacatggcgtgcatgggcatgaggccgctgggc

SEQ ID NO: 7310 - DNA, 218 bp, Zea mays
tgggttattgcttccgcaggagaggaccaggaggagtagcgtggccaggcttcgccatgttactcggttatatcagatagatatttccgctgcattaaaatttatggttattatttctgaaactccgataatgtaatcactaatgatactccttaaatttgtggtattatgctttattgtatttctctgtgcctcaccttcgagtgagctagtgatat

SEQ ID NO: 7311 - DNA, 160 bp, Zea mays
cacattcataaagtagcgcgtgcacctcttgttgtagcttcttagctcggctacgtgtaattggtccatcaaagacttgggtcggtgatgatgttggttgtacttgagttgatgtagtatgacttgggggttgtaacgtgttgcttgatggcgtggtcat

SEQ ID NO: 7312 - DNA, 156 bp, Zea mays
aggatgtcaacttgaccatgggagccagcgagttattcaatctttacgacgacgctgccaagagttgcctcccacgagtgaggccaagttttcctgtggtgagcttggttgatccagatgtcatttgcttcctcctcgaggacaagttccgcgatc

SEQ ID NO: 7313 - DNA, 238 bp, Zea mays
aaataggtgtcgttcccggttgcaactcgatggcgaattcaatatcctggtctggtggctttcctaatagttcatcaggaaaaacatctgcatactcacagaccactggtgtgacaaccctcccaagttatcaggcccacatgcaccaatccttgccttactggcctcggatggccgtgcacgtgtaccgggtaacttaacaaggctatcgagttcgcccagtggaagtcatcatccc

SEQ ID NO: 7314 - DNA, 99 bp, Zea mays
ttttaaattgtctttgcctagtgttggaaaaaaagcactcgaccaagagctctttgtcgagtgttttatttttgacactcggcaaagaaactctttgcc

SEQ ID NO: 7315 - DNA, 73 bp, Zea mays
gtcgcggctccccgacctcgacgtgcggtggcggcggttcctcgatccggagtagaggcggtggtagcggctc

SEQ ID NO: 7316 - DNA, 133 bp, Zea mays
gcgacctgcacacacctgatggcgttcgcagcctctcccttgctgccaaggatcatcacccacatatagcgggagagatcgtcgatgagcaacaagaagtagcgtcgtcctcctggtgtggctggtgtcaccg

SEQ ID NO: 7317 - DNA, 106 bp, Zea mays
aatgtgggaaagggttgtgggccgttggatgctaaatcagaagtcatctgaggcatcgtttcttgtcctccccctaaaccctagccaccctccccccttcccacct

SEQ ID NO: 7318 - DNA, 104 bp, Zea mays
cgagtgtctaggtatgacactcggcaaagagggctttgccgagtgtctattacgtagcactcggcaaagaagcctctttgccgagtgccagccgttggctctcg

SEQ ID NO: 7319 - DNA, 82 bp, Zea mays
tatttacgcatcgttatgcagtcgttaaccgccgccatatcacagatacgaacgtggacgagcggctgtaaatgagaatttg

SEQ ID NO: 7320 - DNA, 111 bp, Zea mays
ggttcacgggctaactgtgtcacactttgcctaaggttagtcgtccgaattgaagaactaaccttagttagaaaagttagggcaaagtgtgacaagttatgcagtaaacca

SEQ ID NO: 7321 - DNA, 153 bp, Zea mays
cctgagaatccatggtcgtcaccgtcgtcctaggctcctagcagtcggcgtagtgtatggctggttattttagggttttatttttttgctagtctgctagttgctttgttgggctaggacctggggtttggtgcgctgccatgctgggcttgg

SEQ ID NO: 7322 - DNA, 85 bp, Zea mays
cggcctggtagctcggcgtcacagatctaggcgccgagctacgaaagctcggcgccacagatcttggcgccgagctgcgtctgcc

SEQ ID NO: 7323 - DNA, 169 bp, Zea mays
aacttctggcaggcttcgcaggaccttgtgacccggtttgcggcgcaaatcattgcgggccagtaaaaaccctggcggatcaccttagcagcgagggcccttggccctgcatgtgagccgcacgtgccgatgtggacttcacgtaggatctgcatgccttcggtttcgg

SEQ ID NO: 7324 - DNA, 107 bp, Zea mays
cgacgggtgacgactggtggcggcgcacgagcgcgactggcgatggagtggcaacacgcagtagtaacgggcgcgccgacgcggcttgcggcggtggcatgcaattg

SEQ ID NO: 7325 - DNA, 153 bp, Zea mays
tgttttttgacgggcactcggcaaagaagtctttgtcgagtgccgcactcgacaaagtcctgctctcggtaacggccgcgtttaccgagagcaggactctcggcacagaaatacactcgacaaagaaatctttgccgagtgccaaacactcgg

SEQ ID NO: 7326 - DNA, 96 bp, Zea mays
caagaagggggagtcctcgacgcagggccgcaaacgcggcaagccgcgcaaggcgcgcggaagagcccaggtcagggcgcgaggacaagctgaggg

SEQ ID NO: 7327 - DNA, 105 bp, Zea mays
ttcgaggagtgtttgacttgcgcatggaccccagcttctataatacaattgatttgtgtgagtgttgggtgtaggccgaacgcgacccagatcacgaagcgaagg

SEQ ID NO: 7328 - DNA, 252 bp, Zea mays
atacaaggatgctgagccccgacatgtgggcccaggatcataatggaagaaatacattatgtgaataagtaatgctgacagagtaacgcatgagtaatcagcgggagtcataatgactgcagtccatgcagtattaataggtcgttacccttttcttggtaacgcgagagtaatggtgagtcattgccctcgctatggtaacatgtgagtaactgcacggcccacgtatcgtggactgagcatgccgcctgt

SEQ ID NO: 7329 - DNA, 89 bp, Zea mays
acttcgccatgtttgacggtagccgccccgtcgtgctcgtctccggtgctcgcttcggccgcggacgctgtcgagcccgtcgttttccc

SEQ ID NO: 7330 - DNA, 101 bp, Zea mays
gtagtgccatgtggattgggtgggattgagtaggttaaaatcccaaacaagttaaaatccttcataattttttcaatcccatctaatcctcatgggatagg

SEQ ID NO: 7331 - DNA, 102 bp, Zea mays
taggttagcggacactcggcaaagaagtaatctctttgtcgagtgtattaggtgaccactctcttaaaaaggtaatttctttgccgagtgtcatctagaaca

SEQ ID NO: 7332 - DNA, 186 bp, Zea mays
ttctcatgtccctactgctgttgggagggtttggagtccggatcggggatctgcgacaaccacgttgtttaacacgtcatcagcactgctctacctcgactcgtggatccgatcggcatcgactctccatcacgccggcaggtcctccggcttttctgaactgtcctacgcgataggcttcgttcc

SEQ ID NO: 7333 - DNA, 86 bp, Zea mays
cgctggagctctactgccgccgataagccccaccgcctttttactatgctgcgggtactgtttaagccggtcagggagcgcgagtt

SEQ ID NO: 7334 - DNA, 92 bp, Zea mays
ccctcgggatgactgtgtggtcgcgccatgcttttgtttgagcttggtatttgtttagagcctgtagggcgaagacgcggtctctgtcgatg

SEQ ID NO: 7335 - DNA, 80 bp, Zea mays
agcagtcgagccagccagagcgcctgagtcaaagcagtggacgccgctatgtactcggcctcgcagctggacatggccac

SEQ ID NO: 7336 - DNA, 113 bp, Zea mays
ctcggatgaagtggtatctcagccggatgtgcttgctccgttcatgaaacacggggttattggccaatgccagagcggactggctgtccaccctgagttccaccgctccagtg

SEQ ID NO: 7337 - DNA, 118 bp, Zea mays
catgaggcgcgatgttcgagcgagcgatgtcacggaaggggcgagatgcgcgcagcgatgatcgcgcgtgacatcctctgatccggcgcatttttcttttcgtttattgtgttttatg

SEQ ID NO: 7338 - DNA, 141 bp, Zea mays
tttagaggacggtatagagtgccttgctggggccgtaggggacctgacagtcctatatatttagaggaaaggaccctttacacggtgctgttggagacagcctaagcaagccaacggtgcaagctgctgccgactggtgtt

SEQ ID NO: 7339 - DNA, 149 bp, Zea mays
aagtctaagtcaggccttgttcgtttgtgtcggattgcacccggaatcgttccagctaatcaaagtgtatataaattagagaagcaatccggctagcaatcgttccaacccaccaatctgacacaaacaaacaagacctcaggcggcag

SEQ ID NO: 7340 - DNA, 211 bp, Zea mays
ttttctccgattatgtgtgtaatgtctgcgtgatgggtgaagcgctctttttttatatgatgaagatacggttaaccgaacttgttgagtgattacgcgcacctgcatgactgtctgaggtccttaggacaaggacatctagaggtgggcctaataccttgggaggttcacagcacccttaggcgacttttgctcggatgatgtctttgtt

SEQ ID NO: 7341 - DNA, 103 bp, Zea mays
caatgccctaggcccactactcctgctccttctgctgctagaacagcatccccaactcgacccgtccaacctgtggcagggtggtaggccaagtcacaccatc

SEQ ID NO: 7342 - DNA, 78 bp, Zea mays
gaagtcttgctccaatcccggaggcggtaggcgtggttctatctgaagccatctgccatgggaagagagttgctatta

SEQ ID NO: 7343 - DNA, 101 bp, Zea mays
acactggggtgtcacagccttctcttcttaaaggaatatcgtcccaagattcgggtcaaagtcctcccacggtgaagcgaagggtgagacttatatttatg

SEQ ID NO: 7344 - DNA, 88 bp, Zea mays
ggcacgtacgtcggcgccgtagatcttgccaccgaggtatgcgccatggatctcggcgccaagatctacggcgccgaggtacgcacct

SEQ ID NO: 7345 - DNA, 152 bp, Zea mays
caagaagaaacttggcgactgccagttcgacctctaggaacagtcctacgtggccgcatgtgccgctatctacgacaagctccggcgcagacgccgcttggacgcggtgcagagcggctgctccgcgctgtccatcgtcaagcagggggacc

SEQ ID NO: 7346 - DNA, 136 bp, Zea mays
aggcacggcccaaattggcacggcacgaccaggcccatgggccgtccgggccaggcctgcacagtcctacgtgcctggccagagacccaggcacggcccttcgggtcgtttttcgggccgtgccagcccgaaaagc

SEQ ID NO: 7347 - DNA, 133 bp, Zea mays
cggggacggctgacggaactgttcgcggggacccatgttttatttcttgtggggtcatggcctccgatccgtatagaaggcggaaaggagtgaaccctgtcgccctgcactcagtcgtgtttagtgcccagac

SEQ ID NO: 7348 - DNA, 204 bp, Zea mays
cggttagcctctacacaggcggttcgaggaaccgcttgtggtgcaccgcctgtgatgtaaaacaacatcacaggcggtcaatcaaaaaccgcctgtgatagacacacatcacaggcggtccagtttaaaagaaccgcctgtgatagtcacacatcacaggcggtccggtttaaaagaaccgcctgtgatagacacacatcacag

SEQ ID NO: 7349 - DNA, 188 bp, Zea mays
tgtagtatttgagaccaagtccccaacacgtctatccagcatacccttgagagtcttttctttagtcgggtaagtcttgctgagtaactccatactcaaggttttattccctgttgtttttcaggttatagttttgtgctgttgatgatggtgttaagtgccggtgggctcggccttcttataagtct

SEQ ID NO: 7350 - DNA, 87 bp, Zea mays
gtacctcggcgccatagatcttggcgccgaggtacgcgcccgatcaacgacactacctcggcgccaagatctacggtgccgaggtac

SEQ ID NO: 7351 - DNA, 80 bp, Zea mays
acagcgtgatggcgtcgtcgtcggatgtggtgcctagaacaactcgagaggcgccgacgttggcgacgacaacgaggtcc

SEQ ID NO: 7352 - DNA, 115 bp, Zea mays
aaaaaaaccggaaccgaggaaccgaaccgaaataaccgagaactgaaaccgaactaaccgaaccgaaagaaccgatataaaattcggttctggttttttgagaaccgaaataaat

SEQ ID NO: 7353 - DNA, 244 bp, Zea mays
ccgtgcgtagggccgggcctccggtaagtcccgaacctccacgggcgtgcccggacccctaggacgggtcccggacccctccgggtggggtccgggccactcaaagcaaggtcccgagattatgggacaaagaatacctaggccttaatcaaggccaggcgggggtccggagccgacacgtgtccggaccatgccgtgtacgcttctgctccccgctcaggcggagacccgatcctgccacatg

SEQ ID NO: 7354 - DNA, 227 bp, Zea mays
ggagagggcacggacgttgcgggcgttagttatttccctccattttgtccctaggctcgcatgttggggctcagtacccttgtacgtgccccccttgagctataaaagaggaggcatgcaacgttacaacacagacccaagtcatccaagacacaactcaagctcacgagcaatacaacacacagtgaagtagggtattacgctccggcggcccgaaccactctaaa

SEQ ID NO: 7355 - DNA, 88 bp, Zea mays
acgggcgccccaccttagggcttgttcggttcctccaatcctcttctggattggtggaaccgaacaagccctaaggtggggcgcccgt

SEQ ID NO: 7356 - DNA, 104 bp, Zea mays
ggagccaagtagaacggagccgttccattcctgattctaggaatagagccgctctgttctgtgtttggtaaactggaatggagcggctctgttttttgtttggt

SEQ ID NO: 7357 - DNA, 144 bp, Zea mays
tgaatatgtttgtaaagctgaacgtgaagtgcagggacgatgatcaaagacttatactaactcttttgcaggccggggtccgacacacagctcaactccttccagccctgcaccttctacgcctagcactacaccgcgcacagg

SEQ ID NO: 7358 - DNA, 83 bp, Zea mays
ttagctcgtcgccgtttgcccgtgcgcagcgagtccgttcacggaccaatccctctgccaccgtagaccggctagcagagcca

SEQ ID NO: 7359 - DNA, 201 bp, Zea mays
cattactagctgagtgcccgtgcgttgcaacgagaatatataataccagtatattacgataacttatatacaaaatgtgtgttatattgttatgagaaaatgtttcataatcaatttatgatcctagccatacataaattttgttattttaatatagttgtttcaccactacattgcaaccatcagtatcatgcagacttc

SEQ ID NO: 7360 - DNA, 251 bp, Zea mays
tggttgcatgtatttgctagtgcttgtgttgcgggatgtaataagttggtgtttggttgttgtcaaccaggctctacgcgtgcgagatgtgtgtttagttacctgcatgcagatgtggagtcaggctcgcacgatacttaaaacaccctgagccaggctctgcaggcgcgagcaaattggtcgcatctctggagttaggctcccgccgatttagctcatgcagccaggctacggggagaagccaaccaaac

SEQ ID NO: 7361 - DNA, 110 bp, Zea mays
ccacaaagggtgttggtcgattaagacagcaaaacggtggtcatggaagtcgaaatccgctaaggagtgtgtaacaactcacctgccgaatcaactagccccgaaaatgg

SEQ ID NO: 7362 - DNA, 120 bp, Zea mays
gctagtctctttgccgagtgccaggactataacacccgacaaagaagctttaccggttcccaggtgtgccttctttgccgagtgctatgatcattgcactcggcaaagtgaccaaaaccc

SEQ ID NO: 7363 - DNA, 91 bp, Zea mays
gacgaacgggcccttcggtgcgccgccggcctgagcagcgggcgcaatttggttgaggagtttgtggcgcacggggtgtggcctttggcgc

SEQ ID NO: 7364 - DNA, 91 bp, Zea mays
cccatggcctgtgacgtaagccaacgggcggagcctgacgtatggcctctgcaccgcaggccgcaccgcgggctatgtcgcaagctacgct

SEQ ID NO: 7365 - DNA, 84 bp, Zea mays
aggctttttacatcacaggcggttcggatagaaaaccgcctgggatgtcctaggctttcggaccgcctgtgctgtattagtatc

SEQ ID NO: 7366 - DNA, 109 bp, Zea mays
tgatagtcacacatcacaggcggtccggtttaaaagaaccgcctgtgatagtcacacatcacaggcggtccggtttaaaagaaccgcctgtgatagtcacacatcacag

SEQ ID NO: 7367 - DNA, 183 bp, Zea mays
caatgctgccgggctcgccggtgaagcgcctgctgcggctggcggccaaggggcggcgggagaagaccgagctggcggggctggccgcggcgaaaaaaaagctgctgctgctctgcgccccctcgctccgctgctcggccgccgcgcgcgggaggctctgggccggtggggtctccgtcacgg

SEQ ID NO: 7368 - DNA, 248 bp, Zea mays
atgcggccacgaggacggcggcgtgatttgcgtgcggagctggcgcggcggcagccgatcgcccgatcgcgggaggcagaacagtagctgtgcacgcctacgctaacctcatatagagtagtagtatatatatatatatatatatatatatatatatatatataccaattgcgttccccgattaggcgcgatgagtcggccttatcagttccctagcacagattatgtccaccgactcgactaaagca

SEQ ID NO: 7369 - DNA, 96 bp, Zea mays
ccgacggcttaaagccgtcggagataaggctttgccgtcggaaataatctatttccgacggtttattccttatgtccgacggttttgaccgtcgga

SEQ ID NO: 7370 - DNA, 166 bp, Zea mays
gaagtgtgaattaatctttgtcgagtgtcccctggccgacactcagcaaaggatcctttgccgagtgtcgctgatctggcaatcggcaaagcttattttaaaaataaaaagaaatctttgtcgagtgccagatcgcgggcactcggcaaagaaggaaaaatatact

SEQ ID NO: 7371 - DNA, 111 bp, Zea mays
cacattgactgtcagcagggtggacaggcgactcgtcctttccgcaataaatgcagagaccgcgcggcctagaggccttacgtcaggctccgcccgctggcttatgtcacg

SEQ ID NO: 7372 - DNA, 156 bp, Zea mays
tagtcggttacccgtgcgttgcgacggctcacaacaatacccacgtaaattatccaccaaaaagatagataatcaataaaaaatcttgagatatttttggtggataatttacgtgggtattgttatgagtcgtcgcaacgcacgggtaaccgacta

SEQ ID NO: 7373 - DNA, 78 bp, Zea mays
gactcggcaaagagctctttgtcgagtgttatatttttgacactcttgacactcggcaaagaagctctttgcccgagt

SEQ ID NO: 7374 - DNA, 141 bp, Zea mays
gtacggtcgtactgttggactgcgggtttctcgaagcgtcgcgctctgtcggattgcgggtttcccgaagagccgcgccctgcctataaaacgggcgggggtcggcgctttttgaactttgccttccacgctccgcgaaaa

SEQ ID NO: 7375 - DNA, 129 bp, Zea mays
aaacactcggcgaagtctttgccgagtgtgacactcgacaaaaaaaatctcgatgaactgtacatcgacaacggctttttgccgaatacttttttgtcgagcactcgacaaagactttgccgagtgcca

SEQ ID NO: 7376 - DNA, 127 bp, Zea mays
acaaagagtgagcctttgccgagtgtcacggtggcagtcagcaaagtctccgtcgccgtcatcaggcgccgtgatggcgacttttctttgttgagagtcacgtggcactcggcaaagtctttgtcga

SEQ ID NO: 7377 - DNA, 155 bp, Zea mays
aattgaaattcataaagtagcgcgtgcgcctcttgttgtagcttcttagctcggctacgtgtaattggtccatcaaaaacttgggttggtgatgatgttgattgttcttgacttgatgtagtatgacttgggggttgtaacgtgttgcttaatgg

SEQ ID NO: 7378 - DNA, 114 bp, Zea mays
aaggggattgagggctgatttggtgactagaaaaataattttgaaaagcaaggggattctttcccatggatcctctgtatttttctggttaccaaaccagtcctgaaggagatt

SEQ ID NO: 7379 - DNA, 157 bp, Zea mays
gcgtgcttggcttggagcaatttaggatgggtgtccgaccgggaagttttctcgggtgcgcatgagtgaggacaaagtgcgcacaaaagactcgtgttggtctataagaacaatatatgatcctagagagctgccaggagtaagtatcgccggtcca

SEQ ID NO: 7380 - DNA, 171 bp, Zea mays
tcgacgttttggaggcgtaggcgagggattagctgatatagaaaagcagggaatagaccactcgctaaaacgaacaagaacactctattacttggtaacctctttgattaaaaccatagatactcacgtcgtctacatctgttatctctctcctagcagccgtcgttcttt

SEQ ID NO: 7381 - DNA, 82 bp, Zea mays
tccttcatggacgccaagataaaaacatagtggcgccaattatgttggcgccactatgtgttacctcggcgtcaatgatgac

SEQ ID NO: 7382 - DNA, 73 bp, Zea mays
ttaagggcccgttcgtttccgtcggattgggctgtttctggcctggttccgagcggaataaattggcctgaat

SEQ ID NO: 7383 - DNA, 64 bp, Zea mays
caaagaagctgttgccgatgtacagttcgccgagcgatctttgccgactgttacactcggcaaa

SEQ ID NO: 7384 - DNA, 80 bp, Zea mays
tgcctcgccggagaagccagtccacggtcgtcggacttcacccgaccgccggtgaacgtagaccgagctcctcggtgagt

SEQ ID NO: 7385 - DNA, 83 bp, Zea mays
cacatcatatctcggcgccatagactgtggcgccgaggtgttacctcagcgccacagcctatggcgccgagtatcgggtccaa

SEQ ID NO: 7386 - DNA, 166 bp, Zea mays
tgctgagcgccgggtttcgccgagtgtttggcactcggcaaagttatttttgccgagtgtcttcctttgccaagagtcctgctctcggtaaacgcgatcattaccaagagcaggactttaccgagtgcctgatagaaagcactcggcaaagccccgagcactcggc

SEQ ID NO: 7387 - DNA, 152 bp, Zea mays
ccgagcccctgccgccgtagaccggctaacccagcctttcccaaccccgtccaaccctcggagacgagtgagcacacctcggtgaagctccccgagcgaggaatcgaagtctgctttgccggagaagccagtccacggtcgccgaagttcgc

SEQ ID NO: 7388 - DNA, 196 bp, Zea mays
catagacaaccaagcttgcttcgcctcagtctatcatccgcagtccaacggggttgtggaacgcgccaatgggaaaatcttcacagatatcaaaaagatgctcctcgatgagaaaaagggcagatggaccgatttgttacccgaggcagtctaggcactaaacacgactgagtgcagggcgactaggtttactcct

SEQ ID NO: 7389 - DNA, 194 bp, Zea mays
aagtctgcacgggtacctgttggttacaatagtagcgatgaaacagttagattgaaaaaacaaaatttaagtatggctaggatcacaaattgagtacgaagcatttacacaaaccagtataacacacatttgttcataagttatcatgtgttttttgtttctgttgcaacgcacgggcacccatctatatgtat

SEQ ID NO: 7390 - DNA, 213 bp, Zea mays
aaatgaactagtgccgtttggttcacatactggtaacgtaatgggtaaccgataacgttaaatcatgtttgtttaagttcaaccgtaatcgataccacattacaaatagatagcgccttattcaaattttttaccgctactattagagtgtgaatcgttaccattaccatttacgttacatttcgcgaaccaaacggcacctaatttcctgtc

SEQ ID NO: 7391 - DNA, 142 bp, Zea mays
ctcggcaaagcggtctttggcgagtgttcttctgtgccgagcgttctgctctcggtaaacatggtcgtcatcaagagtaggactttactgagtgcccactcggcaaaacatcgagcactcggcaaagaaccgaattttagta

SEQ ID NO: 7392 - DNA, 107 bp, Zea mays
ggtatatgcccgtgcgttgctacggaatcaatataataaaatacaataattttggtatatcaatgtatgttatcaaattaattttgtaacaacgcacaaacatatac

SEQ ID NO: 7393 - DNA, 89 bp, Zea mays
gttattcctttcagctcgatgcttgcatgtgccaccagcacgcacggtacgccctccgcctgtgcgacgttggcctgaccacgtcgtgt

SEQ ID NO: 7394 - DNA, 184 bp, Zea mays
gctagtccggcgggcactcggcaaagatggagcctttgccgagtgcaatctaatacgctcggcaaaggccatggtaaaggggcccacgggggctcctttgtcgagtgtccgtacattggacactcggcacagactctgtcgccgtgacgtcgacttttctttgccgagtaccggctgacactcg

SEQ ID NO: 7395 - DNA, 231 bp, Zea mays
gcggtagtggtcccgcttttgccgctttgtgtcgaagtcggtgctggaccccccagtgatcatatgaatgactccacgatacggctgatcggcgaagtcttcttgttttggggcgtgggggtgggggatgttctgatgttgctggtgtggaggtgggggtggaggaggtacgatttgtacttcctggtgttgttggtatgcgtggtgcggtggatgcggggcgggggcgtg

SEQ ID NO: 7396 - DNA, 81 bp, Zea mays
ggataggtcccacccgcaggtaaataatacaactaaaacgttatctggtagacctgcaggtggggcctatccacctttttg

SEQ ID NO: 7397 - DNA, 199 bp, Zea mays
gattaagtaagggggtgtttggtttctggggactaatttttagtctctcaattttattccattttagtccctaaattactaaatatagaaactaaaactctattttagtttccctatttaacaatttatgaactaaaatagaataaaatagagggactaatgtttagtctctataaaccaaacaccccctaaaattgga

SEQ ID NO: 7398 - DNA, 86 bp, Zea mays
ggaccctttgctcgacgtcatagcctatgacgccgagggaacacatctcggcgcccataggctatggcgctgaggtacgtgctgcg

SEQ ID NO: 7399 - DNA, 196 bp, Zea mays
gcagcagtgcgtcgacagtctatggatttgggtgttttatcgaataggcgggatgtgaggagccgagcaatcacttgaacatggtcgacgacaaggtctgccgggagagaatatcggcacacgacgcggcacgacgaacgcgcagagcttcaaaaccacgcgcgcgagatccaactactgcgcgatgcactttagg

SEQ ID NO: 7400 - DNA, 84 bp, Zea mays
gtagactttttacatcacatgtggttcggttagaaaacatgtctcatgctattcgaaccgcctgtgatgtattagtatcacaag

SEQ ID NO: 7401 - DNA, 106 bp, Zea mays
atggaccgagctggtggcccagacacgacactatgtacgggccaagcccgacttctgttgtatatggaccaggttgtgtcgtgcctgggccatgcgtttgagtgcc

SEQ ID NO: 7402 - DNA, 132 bp, Zea mays
agagttcaactaggcgggccgatgagcatcaccacacgtaatggaacccaaaacacctacaagctcgaccgtggttacctcagagagctctggccacaacgagatgtctcacggcggcgctggcgaccgatt

SEQ ID NO: 7403 - DNA, 112 bp, Zea mays
gtgaatgactccgcgatacggctgatcagcaaagtcttcctgttttggtgcttgggggtgatttgagtggtggatgtttggctgatgcgggtgtggaggcggaagtgggggt

SEQ ID NO: 7404 - DNA, 130 bp, Zea mays
ctctcacctacgggtcttcggctgcctcgtgttcaccaaggagcttgtcttcattggcaagctcgacgacaggagcaccccaggggtgttcattggctacgcggagggctcgaaggcgcgtgtcttattt

SEQ ID NO: 7405 - DNA, 89 bp, Zea mays
tttctctctcctctccgcacaagactgcatacgctcgcgggtgctcgcgggacccagctgtcacagtctgcatgcggagtgtaaatacg

SEQ ID NO: 7406 - DNA, 73 bp, Zea mays
atcctacgtcgtgaagatcgggcatcgtgatgcatcatttggtatcggagcctcagttgccacggtaggattc

SEQ ID NO: 7407 - DNA, 128 bp, Zea mays
actcggcacagaagcctttgccgagtgcccgttatccgggatgccctctagtttattttaaaattttaaaaaaatctttgccgacgttcaaaaagggcgggcactcggcaaagaattttaattaaccg

SEQ ID NO: 7408 - DNA, 130 bp, Zea mays
atgctgggcgccatagcctgtggcgccgaggtatgacgtggcagcaacggctacctgcgcccagggctgacctgtcatcgatgtggaggcgacgtggcctcgtagctcggcgccatagatcttggcgccg

SEQ ID NO: 7409 - DNA, 237 bp, Zea mays
ggggcacgcggggtcgggcgtcgggcgtgctctagcgaggtcagggcgcgtcgaacacgtggaggtgtttttctgcccttgttcaaaagcttgctgagatcgcaaacgtgcgaatcttggcaaaaatcctgcgcggaccttttccttgcacctagggctatctcttgtatgtgagttccaacgggagatatgccctagctagggagatatgcggacgccaaatctaggttgtctcac

SEQ ID NO: 7410 - DNA, 165 bp, Zea mays
taagaacgtgggtaccgtcgaacttaacattaagaacgtgagtaccgtcgaacttaacattaagaacgtgggtttttaagttcgacggggaccgtcgaatttttccccataagttcgacgacacccacgttcttacatttaagttcgccggggccacgtggccgt

SEQ ID NO: 7411 - DNA, 194 bp, Zea mays
agtaagaacagggccttggcaaggttccgggacctgttgtgttcttggcacgaataggggttcggggccaacacgtgtccagcccttgccccttgcttcccgctcaggcggagtaatatatacagccgcaaggctagtggcccgtgacataagccaacgggccgagcctgacgtaaggcccatacagccgtgca

SEQ ID NO: 7412 - DNA, 232 bp, Zea mays
ccccccggggtcgaaacgccgacagatcagagtatttattacatagcaggctttctggattgggcctcaaattcctgaaagcgcagggggctatcctataaatattcctagactcagccaacaacctatctagacggtgggttgttttctaaaacacccagggtattttatgcaagtagctcagcacgaaggggtatcatgtgatatcggtcgttggatccctgaccgagcg

SEQ ID NO: 7413 - DNA, 116 bp, Zea mays
catcgggcctcctcgttcttggccctatccacatgctgcaaggtgaatcccttgaactgtctctcgagactttcggatggctgtgaggtattgcatgagcgcggggtctttttgct

SEQ ID NO: 7414 - DNA, 103 bp, Zea mays
ccagggcatggcgtcaacggatttctgcagctcgcggcacacccgccatacacacagagaggagcgcggcggcctgcggcttctgtttgcgaccgagcggggg

SEQ ID NO: 7415 - DNA, 108 bp, Zea mays
taggtgttaatgtcgtatagtgccggcacgacacgattaggcactataatgtagtgtctgggcgctggttaagcattagtgccggcacgacacgacaaaattattaat

SEQ ID NO: 7416 - DNA, 85 bp, Zea mays
aatcattccggagcttcaatccgtgaaaatcgaacagggcctaagggtatatttggttccagtggattgagcgcccagaataatt

SEQ ID NO: 7417 - DNA, 110 bp, Zea mays
tggttcgtagctaactgcgtcacattttgcctaaggttagtcgctcgaattaaagaactaaccttatgcagaaaagtttggcaaagtgtgacaagttagacagcgaacca

SEQ ID NO: 7418 - DNA, 136 bp, Zea mays
ttgtactaggtgagtgctcgtgcgttgcaacggaaatatatatcacgataacttataacagtataacccatttttgtacataagttattatgatatatgttctcgttgcaacgcacgggcactcaattattaacaa

SEQ ID NO: 7419 - DNA, 84 bp, Zea mays
ccgagtgcccgcgatctggcactcgacaaagaatatttttatattaaaaaaatctttgccgagtgccagatcacgggcactcgg

SEQ ID NO: 7420 - DNA, 106 bp, Zea mays
ctgccagttcgacctctggaagcagtcctacatggccgcatgcgctgctgtgtacggtaagctccggcgcagccgccgcttggacgcagtccagagcgggtgcacc

SEQ ID NO: 7421 - DNA, 79 bp, Zea mays
tcgtgtggcacacctgccggaaaagtacgatggagctaaacaacgcgatctgtgaattcttgtcaggtgtacgtcactg

SEQ ID NO: 7422 - DNA, 94 bp, Zea mays
cctctgcggcctggcattgtgacgtgtggcgagcgttaaccggtgtctggacagcgcacaacctctcgcccacgtgaacgatgcgtgtggtcgt

SEQ ID NO: 7423 - DNA, 77 bp, Zea mays
gagcagctctttgctccggcacgaggacatactctccgtcggcgaggttacagtctatctgtcggggaccataatta

SEQ ID NO: 7424 - DNA, 75 bp, Zea mays
gcatctcgctgcgagccaggctgtggagaaacaggttttatttctgtatctcgtgagctaggctctggctagcct

SEQ ID NO: 7425 - DNA, 79 bp, Zea mays
gtgaccgatcgaacgtgacagcacatgcgactgtgcacgctcctacgcacgtcagtgtgccagtctacgctgcaaccct

SEQ ID NO: 7426 - DNA, 82 bp, Zea mays
tcgatcttgacgtggcgctggctgcagcgatgccgcagttgccgcagtgttgctgggtccagcgccaggatcaccaccggtc

SEQ ID NO: 7427 - DNA, 100 bp, Zea mays
ccgtcttacggcttctgaggccttctgtggcagaaccacccgagtgagagacccacatgcacctgtcctgtctcaaagacctcagacagctatgcatggc

SEQ ID NO: 7428 - DNA, 104 bp, Zea mays
agctcggctcggctcggatcggctcgtttgaatttttcacgagaagagctgacatcctagctcggttcgttaacgagccagctcgcgagctaaatgagctacca

SEQ ID NO: 7429 - DNA, 170 bp, Zea mays
actattaggtgagtgtccgtgcgttacagtgctgagtttctctttgataccattctggatggcttatggatattgtcatccatctcataatcgtataacacatatttgtatatataagttatcgagatattatatgttccagatgcaatgcacggacactgacctatctt

SEQ ID NO: 7430 - DNA, 111 bp, Zea mays
gggtgaagggtggcgctttcagcgctggcggcgagattgcggcggccactgctatcaaggacgaagtgggcaccatgtcccgccggctgagggaggcgtcgcagcagctgt

SEQ ID NO: 7431 - DNA, 115 bp, Zea mays
aagggtccagtgccggcacgtgtccaggccttactctacgctttctgctgagacgaaggcccgctgctgccgcgtggagtgtggcccgtgacataagccagcaggccgagcctca

SEQ ID NO: 7432 - DNA, 173 bp, Zea mays
tccggtgatctctggctcgggcgaggctcggggtgtgcaagtgccaacgtctaaggcctctggaggcatttataggtgagggcaccacacaggcgcgcagggcggggcaaccacgcgcggggcgcgcgctgccgcggccagtccgcgctcggccggtcaggcaagcgatcgaa

SEQ ID NO: 7433 - DNA, 81 bp, Zea mays
gccttcgacagcaccctcagcaacgtaaaaccaaaattcattccaattgccccacttgttgcgggcgcacggaaccaactc

SEQ ID NO: 7434 - DNA, 205 bp, Zea mays
gcatccgcgccgaagactcccggagctcgggcgaagacatccttcccccgggggctgcgcatgtccccatcaattccatagcaaaactatcggagaccccccagttctcccatcgcagtacctagcctcctcttcttagtggatggggcagcctccggtgcggggtcgtcttcagtctcagccgccgggtttttcccgcggcggt

SEQ ID NO: 7435 - DNA, 129 bp, Zea mays
ctctctctttagggctgatttggtgacaagtggatcacgggtggataggaggggattgagaaagaaatgacttaatccccttcaatctatttataatacttggtcactaaatcagccctgagtaattac

SEQ ID NO: 7436 - DNA, 106 bp, Zea mays
ttgcttgggacgccataggctatggcgccgaagtacgtgctgcgctggcacaattcggacgacgtggcaccaaactcggcgccaagatctatgacgccaagctcgg

SEQ ID NO: 7437 - DNA, 123 bp, Zea mays
taggtaaacttttgatttgccagtgttttgctttgcctagtggcggacactcggcaaatgactgatttacctagtgtcttactttgcccagcgtaacactcggcaaagaagatctttgcctag

SEQ ID NO: 7438 - DNA, 131 bp, Zea mays
catgaggagggtgaagccgtggtaacaccaagtatgcacattagattcttaatatattaagtatatattgaggctgtcacacctttgtgacgagtgcaaaacgtgttgaatggtcttagatcgtctatagc

SEQ ID NO: 7439 - DNA, 111 bp, Zea mays
gcactcggcaaagtctttgtcgagtgtctgataaagaagtcgttgtcgatgtacagttctccgagacttctttgtcgagtgtcacactcggcaaagacttcgccgagtgtt

SEQ ID NO: 7440 - DNA, 191 bp, Zea mays
aagtctgcacggtactgttggttgcaatgtagtgatgaaatagttagattgaaataacaaaatttatgcatggctaggatcacaaattaattacgaaacattttcacataacagtataacacacatttgttcataagttatcatgatattaaatgtttctgttgcaacgcacggacacccacctatatgtg

SEQ ID NO: 7441 - DNA, 73 bp, Zea mays
ttgtttatgtagagcccaaaaaacccctcatttgtagctacaaatgaagaagttttaagggctataaaaagtt

SEQ ID NO: 7442 - DNA, 108 bp, Zea mays
cggcaaagttctctttgccgagtgtctccctggtgacactcggcaaagattatttcaatgtactttgccgagtgccaccattggacactcggcaaaggattatgtgcc

SEQ ID NO: 7443 - DNA, 215 bp, Zea mays
tcgacaaagacttctttgccgagtgcccccagggtggcactcgggcaaagatgtgtaaggtaatatttgccgagtgtcagatggtagacactcggcaaaggatcctttaccgagtgccaccgatctggcactcgggcaaagtttattttaacaatttaaaaaaactctgccgagtgccagatcacgggcactcggcaaagaaggcgaatatactc

SEQ ID NO: 7444 - DNA, 115 bp, Zea mays
ggcaaagctatcttttgccgagtgctcagcctgcgtgacactcggcaaagactatttccctattctttgccgagtgccacgcagctggcactcggcaaaggaatctttgccgagt

SEQ ID NO: 7445 - DNA, 72 bp, Zea mays
gtgctcagcctgcgtgacactcggcaaagactatttccctattctttgccgagtgccacgcagctggcactc

SEQ ID NO: 7446 - DNA, 126 bp, Zea mays
cggcaaagaggtgctttgccgagtgtcaggaccatagcactctgtaaagaaccaagacctgggcaccggtataggttctttgccgagtacggcggtcttggcactcgactaagaacctgacttggg

SEQ ID NO: 7447 - DNA, 76 bp, Zea mays
tatgaccttggcactcggcaaagaaggaaacctgggaaccggtaaagccatctttgccgagtgctgaccatggcac

SEQ ID NO: 7448 - DNA, 151 bp, Zea mays
cgggctcgaggctaggccttcgcccgggatgccctcgggcgatgctgatttttacttcccgtcaaagggggctccctgggtgtgtccaggatccatgcaggcgcagccttcgcctgaggatgggctcgggcgaggcgtagttttgtgcaac

SEQ ID NO: 7449 - DNA, 80 bp, Zea mays
agcagtcgagccagccagagcgcctgagtcgaagcagtggacgccgctatgtactcggcctcgcagctggacatggccac

SEQ ID NO: 7450 - DNA, 158 bp, Zea mays
cgtgaccgccagagtctccccgagccaaccccacccttcaccggacctccctcgctgccgggaaagccgcgacacccttttctttcccgcggttaactgttttagtttgggggaaggactgcgggtgagaggggagagaaggccggggggttttgtga

SEQ ID NO: 7451 - DNA, 156 bp, Zea mays
agctgaagtgtaagggcttgtttggtttgtggctaaatgtgtcacactttgtctaaggttagtcattcaaattgaataactaaccttaggcagaaaagttagacaaagagtgacaactgaggtagtgaaccaaacaggcccttaagtgtgtaaccc

SEQ ID NO: 7452 - DNA, 246 bp, Zea mays
tactttagggggtgtctggttgatcctgctaaagtttagcccgggtcacatcaagcgtttgacttttaaataggagtatgaaatatagacccaaccaactggactagattcgtctcgtcttttaatcttcggctgacaaattagttttataatccgactacatttaataccccgaacggaggttcaaacattcgatgtgataggggctaaattttagcaggggcaaaccaaacaccccttagtgac

SEQ ID NO: 7453 - DNA, 137 bp, Zea mays
cagctggctctgttcggttgtacaggattggagccagaattattccacctgatgaaatcttatataaaataggtaaataatccatgcaggaatagttccagacaaccgttcctgagcaaccgaacaacccctaaggc

SEQ ID NO: 7454 - DNA, 183 bp, Zea mays
ttccgctccccgctcaggcggagacccaatgctgccgcgtggccgactgcccatgacgtgagccaacgggaggagcctgacgtaaggcttatagagtcatgcgtcctctgcatttattgaggataagacacgcagcatgtccattccactggcaggtggtgtgccgccttagcatttaatatg

SEQ ID NO: 7455 - DNA, 151 bp, Zea mays
tttggcactaggggcatgtttggttcgctgcctaatttgccacactttgtctaacttttgtgcctaaggttagttcctcaattcgaacgactaaccttagacaaagtgtggcatagttagccacaaaccaaacaggccttagatctcgtgc

SEQ ID NO: 7456 - DNA, 149 bp, Zea mays
ttggcgagcgtcgcgggtatgggtttgtctctggtatgatgctgcagcaagaagggaaagaggagacatccggtctagtggcgtggatgttggagcagggagaactccacgctgagatgcacagacgacatgctagcgacgcagggagt

SEQ ID NO: 7457 - DNA, 139 bp, Zea mays
ggctgcgcgcggagtcggcggatgttgcgaggtcggtggctgcgagaacggggatggcggccgcggggtcagcggatcggtggatcagcggatgctgcgggatcggtgggtcttgtgaggtcggcggatgcgggaacgt

SEQ ID NO: 7458 - DNA, 102 bp, Zea mays
aatattttgatcgtgatccattaccacacatagtcctagctgaacaagtctaggtgagacttgtctagggaacttgagggtggtgcaattaccttgtgggtg

SEQ ID NO: 7459 - DNA, 92 bp, Zea mays
ttggtttgaagaatcgctccatccacgaacggtctcggcactttgcgacatgggtgatgatgtgatttgtgacatggggggattatgttacc

SEQ ID NO: 7460 - DNA, 216 bp, Zea mays
ctgccgccaccaccaccaggaggagggaacgcgaagagcgagtcaacaaatctagtccctactgctggatcagacccactgccacccgcttcaggcgtaacctatgcaagttagcaaatatcaacacgttaaatgcaaatatcaaaaagtatacaagtgtataaattaatggagagttatcgaacgtaccctatctccaggtgcaggtatatgtgt

SEQ ID NO: 7461 - DNA, 96 bp, Zea mays
ccttccatcagacactcggcaaagaagccccctttgccgagtgcctcctagagctctcggcaaagaaggcttctttgtcgagtgtctagaaggaca

SEQ ID NO: 7462 - DNA, 87 bp, Zea mays
ccgagtgtccgcgatctggcactcggcaaagattttttaaaaatattaatattattctttgccgagtgccagatcgcggcactcggc

SEQ ID NO: 7463 - DNA, 235 bp, Zea mays
ggactttgggtcagtgtctctagcgttgtcccgtcataaaaaacaaactatcacgaaatgtttttatggattttatcttcattgatggagataaaattatagttatgtaaacattcttaacctttaaaaagatgctaacaagagcattaaacgataattaatgcttctacatctcattgtatcttattataacatgtttctttcgtagcaacgcacgggcatacacctagttctc

SEQ ID NO: 7464 - DNA, 106 bp, Zea mays
ttatcttgaccgcgtcagcacgcgactgtggtcgtgttcatcgaattcgccaacgctttgttgccgattcgactgtcgtcgcttcgcgtgttgtcgagcccgttgg

SEQ ID NO: 7465 - DNA, 142 bp, Zea mays
caaaaccttgagggctgatttggtgactggggatccccagggaaagaaaacctcttgctattcaaaattaaattggaaggggattcctcccccatggatccccttgggatccctaatcaccaaattagccctgaagggccca

SEQ ID NO: 7466 - DNA, 72 bp, Zea mays
agagacattacactcggcaaagaacctatgccggtgcccaggtcttggttctttgccgagtgttatggcctt

SEQ ID NO: 7467 - DNA, 128 bp, Zea mays
tctggtatatagtgctcgcggaaggccaccttgaattcttcccaagttatttgatgattggccggttgaacggccacaaaattaccccaccaagtgctggcaggtccgcgcagttgctgggctgcgaa

SEQ ID NO: 7468 - DNA, 251 bp, Zea mays
aaggtgggaatagagacagtgcccatgggaaagtgggaaaatggcgcggaacaaaaaaagcgccacattacttcgagaattggaatagtatagccacatttagagaacaactgaggttaaatcagaagggattaattttaagaagttaatttaggggattgttggagagatgttttcatctaaactctctaaaatactaatttgagaagtttcttagaaaactattggagttgctctaataccgttataca

SEQ ID NO: 7469 - DNA, 75 bp, Zea mays
aaaagcggtaggctttttacatcacagacgggtcggttagaaaaccgcctgagatgtcacaggctattcgagccg

SEQ ID NO: 7470 - DNA, 115 bp, Zea mays
ggtttgaagtcaaagtaggatgagtcggggcaccaccgtctctttaatttttttggatcacgccgcccccaaaaatcactctggtgttcacctcgcccccgtttgactctcaacc

SEQ ID NO: 7471 - DNA, 169 bp, Zea mays
acagctacccgctgcggggacggggaaagaaaaggaaagttgctgcttcggccgaagagttcactcgcttacgcccccccagatgagcctgcgccgaagagtgaaatgttgactccttacccactgtaacaccttgtccaatccctggaccggcggtacttatacctgg

SEQ ID NO: 7472 - DNA, 116 bp, Zea mays
cgcacttgttgtgctagtcctggctgcacccgtaggcgactttcgcacggatagtcttcgcggaagacttcgatttttcgcacttgttgtgctagtccggctgcacccttaggcga

SEQ ID NO: 7473 - DNA, 114 bp, Zea mays
ccagggctggcgctgactacagggctgccacgacggccgccttgggcccccagatcctaggggccccacccccatgcatgcatatgtagtagtcttggatcagttaaggcttga

SEQ ID NO: 7474 - DNA, 118 bp, Zea mays
ccagaacctaacccgaggtccttcttctaccaaaacagtagccgcggcgaagaaaagggcggaggggcttaccggcggcgagactgttccggtgaagtggtcgagggtgaaggggagg

SEQ ID NO: 7475 - DNA, 149 bp, Zea mays
tgaattgataggtatgtatgtcgcgatgattattccgcgtgtagctcaggcacgtatttatttgacgcttgtaggaatacggggctacctgcagcatggtaattgtgtccccgattgcgaagtcgtcgtgctgcgtagctaagtttagg

SEQ ID NO: 7476 - DNA, 179 bp, Zea mays
gactaagaactctaagttacttcttgacttagtttcgtttacaaaatgttattaaatcttgcataatcatgacatacatgttcattgcatttcgatagactgtaatcttgctgacggagagtacatcctcgtgccggagcaaggagctgctcaggaggtagccccagatccagcacccg

SEQ ID NO: 7477 - DNA, 132 bp, Zea mays
gatctgtgtcgtccgacatcagatgctccatgtagcgttcgttagaagtgcaattatgcagcaccggttcactcccagaaaaacaacggacgacctcatgcaggagcagctcatgccggatcaactgaattc

SEQ ID NO: 7478 - DNA, 73 bp, Zea mays
cacgcctatagtgtcgtgcctgggccaccatctcgactcgtagtgctggcacaggcacgacacatttacattt

SEQ ID NO: 7479 - DNA, 75 bp, Zea mays
tcatcccttgtgtgccactgagtggcatataagtatatttttttgtgtctatgacatgtggggcatacagggaat

SEQ ID NO: 7480 - DNA, 198 bp, Zea mays
cacttatcctggtgcaagcatgcaatcgagcgatctggtgcatccgatctagatctaatgatgactgttattttatatttaactccttccacctaaaacatagtacttattttacttttaacccctttcatatgaaaccgttggatctagattagatgctctgaatagtttgattgcacgcttgcaccaaaatgagtg

SEQ ID NO: 7481 - DNA, 78 bp, Zea mays
cggcgagatagatatagtgaggtggccgagggtgtaggggaggttctgacggtcacggcgatgtgcgggtcaccgtcg

SEQ ID NO: 7482 - DNA, 215 bp, Zea mays
gaccttcgacattccgaagcctttgagatttttcgcggatcgagctcgttacgaaaaacgatctagcaccgcgaaggggctactgttggggggccttcttcctcgccgaaggtcctccaagcaaaaacaccttccgcagggtaatatgcaagcagacacaacacgaaggtataagccaaagctacaatccagggagcttcggcatgacaatgcgc

SEQ ID NO: 7483 - DNA, 109 bp, Zea mays
cctgggttgttccgttgttggagatgccctcagtccggtaggttacacgcatgatgcgttgcgtgggatcccgatccgcgacggcattgcgcgacacggccaggcccag

SEQ ID NO: 7484 - DNA, 97 bp, Zea mays
aaataagctcctctttgccgagtgtcttccagagctctaggtaaaaagactggcaaagggtctattggagccacattcggtaaagagtttgtcgaat

SEQ ID NO: 7485 - DNA, 171 bp, Zea mays
ggggtaggcgtggcagcgggggcgaagggcaggaggccgtggtgggaagcggcgagcgccatgggtgggtgcgcgcaatctggagcggagcggggcggagaggcgtgcggcgtgtcactctgcccaccgtgaccgtctccgccctcggctcactggagtggcgttggcgcc

SEQ ID NO: 7486 - DNA, 226 bp, Zea mays
ggcggtgctcggccagagttatgcgctgggcgtctgggagttttccatcgcggactcgtcgtcgggaggactgggctccctcgtcgtgtgttgaagaccgaactggacgacgatggtgcgaggctgctcgttcttgtgcaaagccacggtaaaacacacctccctgcgtagttctctatcgatttctccctatagtttggagcgtcaattatggttagccgtggga

SEQ ID NO: 7487 - DNA, 88 bp, Zea mays
aggcctcaccggcgagatgctggttggcgatgttgtgtacctgctactgattgcggccgtctcgaccggagtctgcctgcgaaggtct

SEQ ID NO: 7488 - DNA, 136 bp, Zea mays
ccccgtaagtgcttgttcggttacaccaatccagaaaaggatcggaggtgtttaaatctcctcctggtcatttttgactagaaggggatttaatccccttctggattggtgtaaccgaacatgtttctatgtgttt

SEQ ID NO: 7489 - DNA, 135 bp, Zea mays
atgatcctagagagctgccaggagtaagtaccactggtctagggattggacggggtgttacaaccccctactgaattgatccaattaatctagcaggccagtcaaagcgggctcctactggctctagtggtccag

SEQ ID NO: 7490 - DNA, 236 bp, Zea mays
cgctgcaattgataaccatagcgtcgatgtggggggcgctgcgcaggtcaacgtctcgtgcgtcgaaggttagcggtatgtgggaccactttgtctgcacgactgggccagtgacggcgacatggttgatgctgcggtagtggtcccgcttctgccgcttggtgtcgaagttagtgctggaccccccagttatcatgtgaatgactccgcgatatggttgatcggcgaagtcttcc

SEQ ID NO: 7491 - DNA, 109 bp, Zea mays
agtgtttgtgcgggaagagcatacctgcagaacagttgtctacattcgtggcacctactttggtgtacggatgattaggtttctaggagtgcctttgcgatagctcacg

SEQ ID NO: 7492 - DNA, 67 bp, Zea mays
cgaccacgccgaagtcaccgcgaggggcagcgctgaccaccctcgcgtgcgacactccgcgcaaaag

SEQ ID NO: 7493 - DNA, 104 bp, Zea mays
aaggggagcagagcctgacgtaaggcctcggggccacgcgatctctgcatttattgtggagatcgcgcgccgcctgaccgccctacgggcaggcgatgcgccga

SEQ ID NO: 7494 - DNA, 75 bp, Zea mays
gatacccattgtcatatctaactcactctaccaagccatgtaccgagctgacgttgacgatgaccggtgccgttg

SEQ ID NO: 7495 - DNA, 102 bp, Zea mays
tttcacggaaagcgtcagcatgttgcgtccaaagtctctggacttcggcagacacagctgccgtgagagcccccgatgcagtacgactggcgaagtcggcca

SEQ ID NO: 7496 - DNA, 88 bp, Zea mays
ccgggtctacgggctgaacgggccgtgcctagagagcccacgtgtctggtcgttggcccaggcacggccctctgggccacttttcgtg

SEQ ID NO: 7497 - DNA, 101 bp, Zea mays
gggcgtgtgtgggttaggggttcgggtatatggtggatggcgcatgtgggtccagagtggtcacatggcatgacatatgatgacactattcacacagacat

SEQ ID NO: 7498 - DNA, 79 bp, Zea mays
gcgggtccgcgaagctgctgggtggcgtactgtatcttagccacatctgaacaaactccattaagcagtgggaatttgg

SEQ ID NO: 7499 - DNA, 110 bp, Zea mays
actaggtgagtgcccgtgcgttgcaacggaaccgtatgataacacgataacttatgtatataagtgtgttatagtacgatgcccgtgcgttgcgacggcatacaaattat

SEQ ID NO: 7500 - DNA, 110 bp, Zea mays
agccagatttggcgcccatctatctcccgatctagggcgtatcatcccttggaactcacacatgtgagatagccctaggtgccaggaggaggtctgcgccggattcatgg

SEQ ID NO: 7501 - DNA, 210 bp, Zea mays
tcgctgtcattggttatttggagccctaaagagatccgaacggctggcgtgccgataacatggtagaacacgtcggagggcagggactcgcctctggcggcagcctagagacaatgcgtcggcttcttcattcttggcccggtccacatgctgcaaggtgaatcccttgaattatctctcgagacttcggatggccacgaggtattgcat

SEQ ID NO: 7502 - DNA, 74 bp, Zea mays
aaggaagaacggagcggctctgttttttgtttagttgcagagtgaactggaacaaagcggctctgttttttgtt

SEQ ID NO: 7503 - DNA, 126 bp, Zea mays
aaagggggcttctttgccgagtgctaggaccacatcactcggcaatgaggctttatcggttcccaggtgtgctctctttgccgagtgttgtggtcattgcactcggcaaagacactctttgcctag

SEQ ID NO: 7504 - DNA, 154 bp, Zea mays
ttcttcatttagggcctatttggtttgtggctaaatgtgtcacactttgtctaaggttagtcgtttgaattgaataactaaccttaggcagaaaagttaggcaaagtgtggcaactgaggtagtgaaccaaacaggcccttaatctttcttcca

SEQ ID NO: 7505 - DNA, 88 bp, Zea mays
gaacaactcactgtggagctcggtctacgttcaccggcgatcgggtgaagtccggcgagcgtggactggcttctccggcgaggcaaag

SEQ ID NO: 7506 - DNA, 70 bp, Zea mays
aaggccattccggaaagttgatgagcagccagttgaacacgctggttttctgggcatccgatggcttcta

SEQ ID NO: 7507 - DNA, 148 bp, Zea mays
ctaggtcagtgcccgtgcgttgcaacggaatgatataataccacgataacttatgaacaaatgtgtattatactgttatgagatggaggatggcgttctcgagctgtccgggatgaagtcgaagcgaaactcgggcaacggtcgagtg

SEQ ID NO: 7508 - DNA, 183 bp, Zea mays
gcatctcaggcgggactgcagcaatgagggcatccagcgctcgtcaatccttgtattagtcgacgtcgtcgtactgaactgcttcccacatatgtcgagctctgttgccgccgcacgtgcagccttcgccgcctccgctgcttctacttccgcccccactgctgtcagttccgccgccgctcg

SEQ ID NO: 7509 - DNA, 259 bp, Zea mays
cgtggttctatccgaagccatctgccatggaaagagagtcaatattatgcacatgctattttttttaactagttattttattcattacatcaagccattacataacacaacaccctgctaccacaagctcatcacacgcgagtgctatctagggtactcccgaactccttctctaaagtgtccccaaagaccttgagaaggtcatcaaggctggccagggacatctcttcggtgtcggatgagttccgatggaggcctt

SEQ ID NO: 7510 - DNA, 250 bp, Zea mays
tctccaacaacgttctctaaatcacgtactctatacgcaaatacttatattagagacatttttaaatttttaatttttgtacatatttatttgtcatactctcaaatgtattgtacatattttaattttgctaaaccagttgggtaaagtattcaaatgcatagaggaccgtttaaagaaactctatatatagagaatccaacagcgtcctctaaatttagaggactgtttagaggacgatgctagagag

SEQ ID NO: 7511 - DNA, 194 bp, Zea mays
aagtctgcacgggtactgttggttgcaatgtagtgatgaaatagttagattgaaaataacaaaatttatgtaagactaagatcacaaattaattacgaaacattttcacataacagtataacacacatttgttcataagttatcatgatattaaatgtttccgttgcaacgcacgggcacccacctatatgtgt

SEQ ID NO: 7512 - DNA, 83 bp, Zea mays
ttgccaggggcgagagggaggctgtgcactggactcaaccttaagctggttccagtgcaccacccctctcttgctcatgtcac

SEQ ID NO: 7513 - DNA, 77 bp, Zea mays
acttgattttagactcagctagtgcttttggcaaaccaaacccctcagccaaacagctacatggtctagaggtagag

SEQ ID NO: 7514 - DNA, 150 bp, Zea mays
cgtgttcatgtgctcgatgttcgcttagcaggacatgcaaaacacttaagcccttcctcatcttatgatttagggtgggtgcactacaccatccggcccgagaattccctctccgacacattgttaggctaactccagcaacgttgtgaa

SEQ ID NO: 7515 - DNA, 89 bp, Zea mays
ggtttgggttcggggattttctcggccggaccaatgtttccgtctcttcttaatataataccggatgacggttattccctccccgaccg

SEQ ID NO: 7516 - DNA, 78 bp, Zea mays
tgtctcgaccacagcactcggcaaagaagctttaccggttcccaggtgtgccttttttgccgagtgctagggccatga

SEQ ID NO: 7517 - DNA, 142 bp, Zea mays
agccctggccgcgaatgggggatcgatgtggacgtttgacatgtgtggggacggagtgccctgacatgtcgtgtgtttaggtttaccttgcaaggtttaaaaactcgattcgaatcgtctgcttctcgcaactaatgagact

SEQ ID NO: 7518 - DNA, 162 bp, Zea mays
ccttagtctagtctttgccgagtgccaccagacaggcactcggtaaagaagcctttgccgagtgctagatcaaaggaactcgtcaaagtatatttgttaattttaaaaaatctttggcgagtgccagatcgcgggcactcggcaaagacgttaattatacag

SEQ ID NO: 7519 - DNA, 192 bp, Zea mays
tgctgggaatatgggcccatttttcgggccagcacgagcacaatctgaaaacaggagattaaagcatggctcgacacgaaataatatggattgagttagcatgcccgaaggcggatctaggctaggcctcaaattccggcccgtcggactcccggcatggcctgcatagatgggccggtcttggcccggcac

SEQ ID NO: 7520 - DNA, 151 bp, Zea mays
ctcgaaatcttaaggccctgttcggttgttccggattggagccacggattaattcctagccggattacttctctaatttatatagattttgatgagctggaatgaatcctggcttattccggtacaaccgaacgggccctaaatcgattct

SEQ ID NO: 7521 - DNA, 196 bp, Zea mays
ccaatgggtcgagcctgacgtaaggcccacgcagccgctcgacctcagcatttattgcggaggggacgcgccgcctaccactacactgacaggcgacaagccctcttggaaataaatgtgccttgtccaatccgttggcaggcggcgtcagggtcgtccaataagcggcgggcctcacttacgtttgacggattgt

SEQ ID NO: 7522 - DNA, 104 bp, Zea mays
ggctagtttgggagtctaaatacgagaggggattagaggggctaaataaggaggggattttagcccttccgaccccctccggttttgtggctcccaaactagct

SEQ ID NO: 7523 - DNA, 246 bp, Zea mays
atcttcattgagctgaacgatcccttggggcacatgatgttctcagaaagcagcttcaaattctgcctaggtagcatctctgacggcagcgctgaaggtatcccatcaggatagggccatcccggaaagttgatgagcagccagatggacacgctggttctcagagcatccaatggcttctaacttcctttttgtcatgcgcagccagtcatcatcatcgagtggattgctggacttagcgaatgt

SEQ ID NO: 7524 - DNA, 247 bp, Zea mays
gggcgcaccggacaccgcgcgatgtgcggtgctcttccggccgctggaccctacctcccgctgaaccgattccagggttggcgggccgttaagcagaaaagataactcttcccgaggcccccgccggcgtctccggacttcctaacgtcgccgtctgccgccacgtcccggctcgggaaatcttaacccgattccctttcgggtgacttttcttgatcgcgctatctgccgggtttcccccgtccct

SEQ ID NO: 7525 - DNA, 73 bp, Zea mays
actcccgtcggcctactctctggccgacgggcgttatgttattctcgtcggcttcagtgtagccgacgggagt

SEQ ID NO: 7526 - DNA, 145 bp, Zea mays
gagagtaggcctccaaaatcgccgtccgcagagagacacttgcacggatgtgcgggcgaccaggttctcgcgactgctcacttcgtccgctcgtccagtgctgatcaagttcctcgtcgccggcgccgtttgagggactgcacta

SEQ ID NO: 7527 - DNA, 79 bp, Zea mays
gtgtcagtcgggcgacacccggcaaagaatattttaaaaaataaaatagtctttgccgagtgcttgtcagtgggcactt

SEQ ID NO: 7528 - DNA, 216 bp, Zea mays
cgacaagaagctctttgccgagtgccacgcaaaaaacactcggtaaaagaaaacactcggcgaagagtttctttgccgagtgttatatttttggcactcggcaaagggctctttgccgagtgtcaaaaatacaacactcggcaaagaaactcctcgccgagtgttttcttttaccgagtgttttttgcgtggcactcggcaaagagcttcttgtcg

SEQ ID NO: 7529 - DNA, 120 bp, Zea mays
cactaaacacgactgagtgcagggcgactgggtttactcctttccgccttctatacggatcggaggccatttccccgcaggaaataaagcatgggtccccgcgaacagttccgtcagccg

SEQ ID NO: 7530 - DNA, 118 bp, Zea mays
ggacccttaccttggcgccgttatcattggcgcccacgtaggacaagtggcgccaatggtactggcgtcgatgtgtgttatctcggcgccaatgatgatgacgccgaggttggggtcc

SEQ ID NO: 7531 - DNA, 155 bp, Zea mays
gtgttttttaggcactcggcaaagaagtttcttatcgaatgccaaacaaaaaacactaggtaaaaaaaacactcggcaaaggatttctttgccgagttttttttttatttttgacactcgataaaaagcttctttgtcgagtgtttttttcaaca

SEQ ID NO: 7532 - DNA, 220 bp, Zea mays
cggaatctggctctttgccgagtgtctagatctttgtcgagtgctatttatcgggcactcggcaaaacagactttgttgaatgctacactcagcataaaatgacactcaacgaagagagtttctatcgagagccaaactctcggtaaagacttctttgccaagtgcccagtactcaacagaaatagtctttctagggaactcggcaaaggctccatcacc

SEQ ID NO: 7533 - DNA, 127 bp, Zea mays
taaccttatctccgacggctcggtacaaggccgtcggagataagcgctatttccgagagccggttgcggccgttggacataagcttatctccgacggcctcgtacagggccgtcggagataagaagg

SEQ ID NO: 7534 - DNA, 134 bp, Zea mays
ccccctgacttctattccttcttccccgtggtccctccccccttttgaacagtacccgtgaaaggaaaaagggcggcgcggcttacctgcggcgagggaggtccggcgaagggtggggttggcttcgggaggtt

SEQ ID NO: 7535 - DNA, 211 bp, Zea mays
actaggtatatgcccgtgcgttgcaacgggtgacatttgtacacgcatagatcattgtttagtgatgttatcaactgatgggtcacacttgtgtatgcataggtcattgtttagtgatgttatcaaccgaattctgcgtgtcaggttgacacgcgagggagatggcatcgggaggcaggctcgggggcggggcatcgggtgtgtgcgacca

SEQ ID NO: 7536 - DNA, 235 bp, Zea mays
aaaaaggaagacacgaaaggagcgagctggctggcatctgcatctgctcgacaaaagggtaatgctctatgaaaagagcccggagattcttggagtatttcgagtatagtacatgtacttagcactgtagtgtagtaacactttgcgtcgagagggagaatagaacgtgttggatttagggctggacaaaatactcatggcttgtgagctcgctcgactcgtagtcagctcggct

SEQ ID NO: 7537 - DNA, 153 bp, Zea mays
agcatgtcagtcttttgactgcaaggacagcgtgctgcaggcatctccttttgacctttttaacttttggactacagcagcttgctgcagtctttcttttgactagagtacaacagcacctctgtgtagtgcagtctgtaggacagcgtgttc

SEQ ID NO: 7538 - DNA, 231 bp, Zea mays
taagaacgtgggtaccgtcgaacttaatgtgcagccctcgcagacccacgcaggacatataagttcgacggccacgtggccccgtcgaacttaaccgtaataacgtgggtcccgtcgaacttaggggaaagattcgacggccctcgcagaacttaaaaatacatgttcttactataaagatagaagatacccaagttcttaatgttaagttcgacggtacccacgttctta

SEQ ID NO: 7539 - DNA, 92 bp, Zea mays
accggccctagggcggttgaaccggcccgggggcaggcggccgagctggggcggccgagcgcggggggcggccgagctggggggggggggcg

SEQ ID NO: 7540 - DNA, 140 bp, Zea mays
gcgggtatatggttccccctgaaagctaccttgaactctctccattccacttcatggtcagctggatgcatagcaagatagtggtcccaccatgtccgcgcgggtccgcgaagctgctgggtggcgaacctgaccttagt

SEQ ID NO: 7541 - DNA, 144 bp, Zea mays
cgggcgcactgtttgacatcccttggataggtgcgccgtctgcaggatggccctggctctgcgtgccagtggagtggacaggacacattaaatgccgagggggcacatcacctgtcagcagggtggacagacggcgcgtcctct

SEQ ID NO: 7542 - DNA, 104 bp, Zea mays
cgggcagggcgcaggctgttgatcgcttggatgttggattggatttggcctctggtcgtagcctcctggcctcctgggccgtaggcggcactgcgacaggccgc

SEQ ID NO: 7543 - DNA, 94 bp, Zea mays
gaatttgtcccagcccagaaccggcacgacccggcttcaatcatgcctgggctagcccggcccattcgccgtgtcggactgggccacagaaatc

SEQ ID NO: 7544 - DNA, 169 bp, Zea mays
gacccgcaagctggcactcggcaaagggagcttctttgccgagtgcctgactgccttgcactcgacaaagggatcaccagtgggcccctttgccagcctctttgtcaatgcgccctgggaggcactcgacaaaagggagttttttttgtcgagtgccagaactgcaaca

SEQ ID NO: 7545 - DNA, 149 bp, Zea mays
acaatccttaggccttgttcgtttgtgccggattggtgggtcggaacgattcctaaccggattgcttctctaatttatataaactttgattagctggaacgattatgggtgcaatccgacacaaacgaacaaggccatgttcgtgtacc

SEQ ID NO: 7546 - DNA, 68 bp, Zea mays
agagagctaccaggagtaagtaccgccggtccaaggattggacggggtgttacaagtggtatcccctc

SEQ ID NO: 7547 - DNA, 105 bp, Zea mays
tatggaggagtggtggtccggtggcgcaacctatgaggcagttgggtccgacggtaaaggagaaatttgtgtcaaatgtgtgtgacctagctaccctactgtgct

SEQ ID NO: 7548 - DNA, 102 bp, Zea mays
gaaaagccaagaggccgccaaggcggaaggtgccactgcctcctagaagctaaattcttggagcccagtggccttaccccagcggggctctcaaatggtggt

SEQ ID NO: 7549 - DNA, 79 bp, Zea mays
gctccgttcatggaacacggggttcttggccaatgccagagcgtactggctgtccaccctgagtttccaacgctccagt

SEQ ID NO: 7550 - DNA, 101 bp, Zea mays
tcctcatctcaggacttagggcgggtgcactccaccacccggccggggatctactctccgacaccatggtagatgtgtaaatgttttaggtatttaggaag

SEQ ID NO: 7551 - DNA, 188 bp, Zea mays
ctgcaaactagaatgtttgcagtccctcacaaaaaaagaggattgaccacacctgtaggttcaccagataatgttttagttgtgttaatgctgctgcgggtggggccaaatctctttttttagagcgctgctgcgggtgaggtcaaacttttttttttgtgaggggctgcaaacattctggtttgcag

SEQ ID NO: 7552 - DNA, 123 bp, Zea mays
tcatttgctcggcgctataggctatggcgtcgaagtacgtgctgcgctggcacaaacggacgtcctggtgccgatgtggcaccaagctcggcgccatagatcttggcgccaaattcgagtggg

SEQ ID NO: 7553 - DNA, 113 bp, Zea mays
ccagtttcaacggtcgtcgtgcgtcatcattttacaaataacccctcacaactatttcaaattaatctgttgcacgtctatagatggccaaacggcggtccggcacgggccag

SEQ ID NO: 7554 - DNA, 217 bp, Zea mays
gaaggcttgcgcatactgcagtaccgtgcgggttccttgattaagggccagaaattcattcaacttctgatcaagaatgccagctgggatgtggtgtcctctgaaggcagtcttgaattcctcccaagatacttcacaatcagcggggagcatagcacggaagtggtcccaccaagtctgagctgggtcgcggagctgctgtgcggcgaagcgagcc

SEQ ID NO: 7555 - DNA, 147 bp, Zea mays
agtgccagatctctggcactcggcaaagtagactttcccgagtgtcagctggttgacactcggtaaagattcttttagaattctttgccgagtgtcaaccagctgacactcggcaaaatctactttgtcgagtgtcatttatggaca

SEQ ID NO: 7556 - DNA, 136 bp, Zea mays
agtactttttgtagggcactcggcaaagaaaagtcgccgtcgaggtgctaggtgacctcggcggaaactgtgccaagtgccacacggacacttggcaaagactcactctttgccgagtgtctactgtactggcact

SEQ ID NO: 7557 - DNA, 191 bp, Zea mays
atttagagggtgtgtctggttttatggactaatttttaatcccttcattttattctattttagtctttaaattatcaaatacaaaataaaaatagtgttttagtttttatatttaataatttatggactaaaatagaataaaataaaataactaaaaattagtccctagaaaccaaacgtacctacagttt

SEQ ID NO: 7558 - DNA, 186 bp, Zea mays
taaacggatacgaattcggaagctcgacctactcttacgattttatcccgggcaaattaattgaaactcggcggcaaaagtgttaatacaaaattaaatcggactacaaccggaatctaagaaaaactaggcgtagaattataaactgagccgttttctagtcgactccgatatcgtttagcttga

SEQ ID NO: 7559 - DNA, 82 bp, Zea mays
ttgccgagtgccagctggatgacactcggcaaagaatcttttataatcctttgtcgagtgtctccctgctggcactcggcaa

SEQ ID NO: 7560 - DNA, 164 bp, Zea mays
aattgaaattcataaagtagcgcgtgcatctcttgttgtagcttcttagctcggctacgtgtaattggtccatcaaagacttgggttggtgatggtgttggttgtacttgagttgatgtagtatgacttgggggttgtaacgtgttgcttaatggcgtggtcat

SEQ ID NO: 7561 - DNA, 154 bp, Zea mays
tgtggcttgcttgcacgacggagagtgtgggagatgcgctggcagacgctcgaggcagccttagtggtgaatggcctcgacacacggggacacgacctcgccctgtcgggcaacgatcagcagccgcgctggcccgctgtctccaagtgcaagc

SEQ ID NO: 7562 - DNA, 135 bp, Zea mays
ggaagacgaacgtgacgtccgacgacggcgaaaacgatggtacgtgcatgttgtaaaacactctcgtgaacgtgcatagcccactgcgcgggtcggtgttgaggctggtgtcggacgaatacggagaggaggcgc

SEQ ID NO: 7563 - DNA, 68 bp, Zea mays
ccactgcactcggcaaagaacctatatcggtgcccaggtcttggttctttgccgagtgctatggtcct

SEQ ID NO: 7564 - DNA, 78 bp, Zea mays
gtgatagctttgcgtgttgtcgagccccgtcgtgttccttgttttcactcgtcggccgacctcgccacgacttagttc

SEQ ID NO: 7565 - DNA, 205 bp, Zea mays
ctggttttatcccttgtcttacggctccgtccccaaagaagctaccactggtcgacccctctcctggtctataaaagggagggcttggtctcgaggcaaaggggacgcttcagaagacaagcaaacaaccctggacgccttcaaacggaacacccgcaaggacgagcaggaggaggaggagcgtcgacgagggcaaggaggctgg

SEQ ID NO: 7566 - DNA, 259 bp, Zea mays
ttctttgagatttgtgcggccaaacacgtggcgttaatcaagacaagcctgtacagacgttactttgcaggccgctgcagccaatttttttccgtgttgaaggggtccaggcggaggtagatgggccactggagaggcccgttctcaccttgccccgaccttttttgtgtggtgggcctctggacttggtgcggctgggcccgcctctgcagagagatgcatcatgtccgcgtgaggggcctgttcaggtttcatccct

SEQ ID NO: 7567 - DNA, 86 bp, Zea mays
gtggcatcgcctccaccgccaattcgctcgtctccggctccgcgggggacggtgctgcgcggttgtggtgggaggggcatggcggg

SEQ ID NO: 7568 - DNA, 81 bp, Zea mays
cttcacttcccgctcaggcggagacccgctgcttgtggcccatgacattagccatcgggtcgagcctgacgtaaggccgtg

SEQ ID NO: 7569 - DNA, 202 bp, Zea mays
ttctagagtctgtcgtaggaagttagcgcctcgtttgaccacacccgcggatcagcaactaaaagctaacttcctagaggaggttgtagaaagttagttgtccatgctaacttcctacgaccgcctctaggaagttagcagctcgcttgaccgaacacatgggtcagcatgtgaaagctaacttcctacaacttttataaaa

SEQ ID NO: 7570 - DNA, 152 bp, Zea mays
gtcgtaagctggcactcggcaaagaaggtccctttgtcaagtgactgcctgtctggcacccggtaaagggagctccagtgcctcgcccgcagtcgagtgctctagctgacactcaacaaatagagcttctttgtcgagtgccaggaccatag

SEQ ID NO: 7571 - DNA, 146 bp, Zea mays
tgcatcagacatgggtggtgcgatccggtcgacgtttggtaactgcaaaacagaacatacaagaggtctcatgtgtattggaatctcttttccaccaccaatctctaatttcatcgtctccgggttaagcttccgtttcagccagc

SEQ ID NO: 7572 - DNA, 152 bp, Zea mays
ccacaccctcgacaaccactacgatgagctctcctcccactgtacccacctaaactccctagtggaaagcctagagcagcaagtcaaagagcttaagcaagagaaggcatctctccaggagagtctcagcctagtggaaggcgaggaagcca

SEQ ID NO: 7573 - DNA, 104 bp, Zea mays
attttggttgtctgttattatgccatcacgtgtctatgactggtgggaccatctatgtctatgatttgtgggcccgatggcatactggcgaagcccacaaatta

SEQ ID NO: 7574 - DNA, 74 bp, Zea mays
aggcactttcgtgtattttgatccagccttgaaccctattctctgtgactgcgtcgagctccaccctcagacgg

SEQ ID NO: 7575 - DNA, 167 bp, Zea mays
ggcggagatgctcgtcggcggcgaggagtccggcctaaccagggcgcgataggtcaattgaacggttcagagagcttcactgggtgctggggaagacgtgggtgcaaggaatttgaagatgacttactggttagctcggttcacgcgtggcggcgggtgaccgaagt

SEQ ID NO: 7576 - DNA, 90 bp, Zea mays
ctcggcactcggcccaggcacggcactagccatagagccgtgccggcacgagcccggctccactcgtgtcgtgtcgtgccgtgctccgag

SEQ ID NO: 7577 - DNA, 76 bp, Zea mays
cgatgatggcggggattcctgagattgcgcgtggggaggacgatgatggcggggattcctgagattgcgcgtgagg

SEQ ID NO: 7578 - DNA, 84 bp, Zea mays
cacaatcgtttggtgcacggttctgccgaggttgccgaggatccccaccgtcctccccacgccgatccggcccaccctcctccc

SEQ ID NO: 7579 - DNA, 187 bp, Zea mays
aagtgtggttgccgggttccggtgccaaactgcgcgctaacctagagcccacaaaggttacggtcgattaagacagcaggacggtggtcatggaagtcgaaatccgctaaggagtgtgtaacaactcacctgccgaatcaactagccccgaaaatggatggcgctgaagcgcgcgacccacaccacg

SEQ ID NO: 7580 - DNA, 74 bp, Zea mays
cacgcgatcaggctgcgttggtaatcgactgagttatggcattagttgaatattgactgcgctctggcacacga

SEQ ID NO: 7581 - DNA, 188 bp, Zea mays
aactcgattcgaatcgtctgcttctcgcagctaatgagactgcttgattccttgtactgcatcgagtaagaagtgaaatgtggattatatgagataacttgttgattgaactaattgattgttaccatgtatgcttagaaggagcaaatctagcttaagttatggatagtagaaatttgaaaaagcta

SEQ ID NO: 7582 - DNA, 204 bp, Zea mays
gaatccctccgaccacggcgaacgtagaccgggtaagccacagcgccatttttcgattcaaggcacagctagcctctacatcaccccgtgaagctcaccgtgccattggattggaccagatcgccgtgatttggcaggcacacccgccaccgacgaggatacccgcctgcgcacgtggaccgagcgattccgaccatccctgcc

SEQ ID NO: 7583 - DNA, 84 bp, Zea mays
tatatattcccgttgcaacgcatgagcactcaggtagttagtacatatagcttcagagtttttagagttgtccctgcatagctt

SEQ ID NO: 7584 - DNA, 71 bp, Zea mays
gcgagattgctccggtgaagtggtcgaggcgaaaggggaggtcgcggggatcacaacagtgtgcggaacgc

SEQ ID NO: 7585 - DNA, 202 bp, Zea mays
cctacacgtagggggtgtttggtttctacggactaatttgtagtcccactattttattccattttagtctctaaattgccaaatatagaaactaaaatagatagagttttagtttccgcatatgacaatttagatactaaaatagaataaaatggagaaattaaaaattagtctctagaaaccaaataccccgtaatctcca

SEQ ID NO: 7586 - DNA, 76 bp, Zea mays
tcagggtcatagcactcggcaaagaaagaacacctgggtaccagtaaagcttctttgccaagtgttgtgaccctgg

SEQ ID NO: 7587 - DNA, 171 bp, Zea mays
cagtgctattcgggccagcccggcacgatcgggcctccaccgtgccgtgctcgggtagcaatctgggcacgtcgggcggcccggcccggcacggttaagtgatcgggcctaaacgtgccgggctcaatcgggccgggccaagtcgtgctcgggccgggctgggctgcccat

SEQ ID NO: 7588 - DNA, 212 bp, Zea mays
gcgcaacagaaccgtccagaagaaacagtcatatcttttgattcccaaaagctatgaaggcccataagtacatatagaaaagctcttgaagtctagtttacaatgcttctaaggccgaattaatcaaatctaccagaggtcagccgacctactcccatgctgactggtcagaaggtcaacagtctgtttgttgagggcgttttcgtattaaa

SEQ ID NO: 7589 - DNA, 112 bp, Zea mays
cgcagtcatcccgagggaattcagcgaagggtatctcttatttcgtccgaacagctcggacagagtccagtgtcaagctggagcccaagcgcgagggccctttcattgtcaa

SEQ ID NO: 7590 - DNA, 120 bp, Zea mays
aagaggttacctctttgccgagtgtctaccagcccgtactcgacaaagggtctaccagtggggcctttgtcatcttatttgtcgagtgctctaggagacactcggcaaagcttgcttctt

SEQ ID NO: 7591 - DNA, 258 bp, Zea mays
ggaagatgatgtccgcctgactgccgttgtcaactaggactttgtgcaggtcccagcctgccacgctgcaattgataaccatggcgtcgcagtggggggcgctgcgcaggtcgacgtctcgtgcgtcgaaggttagcggtatgtgggaccacttttgtctgcacgactgggccagtgacggcgacatggttgatgctgcggtagtggtcccgcttctgccgcttggtgtcgaagtcagtgctggacctcccagttatc

SEQ ID NO: 7592 - DNA, 175 bp, Zea mays
gagtgtgatcgagcaggttagcgcgagctttggccaccagcaagcgcagtatcgacgacgaggatcgaggcggggttgactagcacgacaagcccgtgcagtgggcaagggccaacggtcgggagatggcagcacggttcaggcaagcccgcgcaaacactgaacgagaaaaacg

SEQ ID NO: 7593 - DNA, 84 bp, Zea mays
gggtgcgcagaccaacgacctccgggcagaactcaaccgcaggcgtgcgggagaggatgcccgggtctctttggaaagggcgcg

SEQ ID NO: 7594 - DNA, 258 bp, Zea mays
cccactggatgctcttcttcgacggatctgcccgccagcagggtggctgtgctggagtggtcctcctctacccaagcggagatcaagtgaagtacatggtgtaccttgagttcaaggccaccaacaacatggcagagtatgaagcacttattttcggcttgtctgcgaccctatccctagggatctgccagctccttgtgaagggggactcccagttgattatcaagcaggttcgcggagaatgtagctacaacgaac

SEQ ID NO: 7595 - DNA, 86 bp, Zea mays
cagacccccatgcggaggtgccggaccccagtatatacagatcgggcctccgagtaaggtccaggacctccacaggcgcaaaccgg

SEQ ID NO: 7596 - DNA, 83 bp, Zea mays
tgcctaactgtgactgtggcagactggcttgggtacatcaatcacaacatccatacacggctgctcgctgctactacctttgt

SEQ ID NO: 7597 - DNA, 160 bp, Zea mays
cggctgtgcctgtgcagccgtgcgggtgcggctcaacgggcagcggctgtgctgcacacagagaaccctaatctcttagtgggctgacccaaggtattgcccaggcaataccgggccatactgggccctccgcccctgccactgcgcatagcacctttcg

SEQ ID NO: 7598 - DNA, 75 bp, Zea mays
caagtggtatcagagccgtcccccacgctttcacgggtgtgtttgggttaggggttcgggtactggtgcttggcg

SEQ ID NO: 7599 - DNA, 71 bp, Zea mays
agagcttggcgccatagactatggcgccgagatgtgttcgctcggcgccatatgctatggcgccaagctag

SEQ ID NO: 7600 - DNA, 101 bp, Zea mays
agtggtccctcttctgtcgcttcatgtcgaagtcgacactggacccccagtgatcatatgaatgactccgcgatacggctgatcggcgaagtcttcttgct

SEQ ID NO: 7601 - DNA, 80 bp, Zea mays
gtgccttgccaaggcactcggcaaagatgggtttgccggttcccaggtttccttctttgccgagtgtcatggtcagcact

SEQ ID NO: 7602 - DNA, 76 bp, Zea mays
tgctgaccatgacactcggcaaagaaggaaacctgggaaccggcaaacccatctttgccgagtgccttggcaaggc

SEQ ID NO: 7603 - DNA, 92 bp, Zea mays
gacggaatttaggggacgctgctggagacagtctttatttagaggatgaggtcgtcctctactcactccagcagttttctctaaatagtact

SEQ ID NO: 7604 - DNA, 68 bp, Zea mays
gtggcgcacccgacagcctgtttgggcgcgctggttgaacgtttgaaggggtggtcggcctggacttc

SEQ ID NO: 7605 - DNA, 75 bp, Zea mays
ctttgccgaatgttttatttcgggcactcggcaaagagctctttgccgagtaccacgcaaaaaaccctcggtaaa

SEQ ID NO: 7606 - DNA, 93 bp, Zea mays
tttccgccggttcgtcgtctgcggggtggaggtcaacgggagttcatcgattcgccgagagatcgacgctcagccgatctgcgtcattcgagc

SEQ ID NO: 7607 - DNA, 151 bp, Zea mays
agggagacggcaacggaggagggttgaggccaagtgaggtgaaccctcgataggggggagggggggaggcgaacggacctcatagggcgtggtggaaatgaggggccgaccgaggcgcttggcgatctccttcttctgttgctgcgccttc

SEQ ID NO: 7608 - DNA, 84 bp, Zea mays
cgagtgcccgtgatctggcactcggcaaagttttttttaatttttaaaataaactttgccgagtgccagatcagtggcactcgg

SEQ ID NO: 7609 - DNA, 111 bp, Zea mays
gttggggctccgcctgagcggggagcaggagtgtatgcggataggtccggagcgcactagagcaggtctggacacgtgtcagctccgggcccccgcttaggccttaagtaa

SEQ ID NO: 7610 - DNA, 185 bp, Zea mays
aatttacataactattggagttgctctaaggccctattaccaagagatgaacccgaataagtggagccaacagccaagtattcagaacaggttaacatcaatagatacgtggatccaacattgaagtatcacagaacaggtcgacatcaatagtttcagcggagtaaaccaacagagattggtgg

SEQ ID NO: 7611 - DNA, 132 bp, Zea mays
agtattctaggtgacactcgacaaagaggttaccagcgggcccctttgtcagtatctttgccgagtgccaaggcaaagaagctttatcggtgcctaggtcttccttctttttcgagtgctatgatatggaca

SEQ ID NO: 7612 - DNA, 70 bp, Zea mays
aggggtagcagacacgctcgaacagtatggctatgtgcgcggaccgtccgagtatgtcaccagactatcc

SEQ ID NO: 7613 - DNA, 130 bp, Zea mays
gcaaaaagggagcctttgccgagtgtcatcgtggcacttggcaaagtctttgtcgccgtcacctgtcgctataacgacgacttttctttgccaagagccagatggcactcagctaaggttttgtcgagtg

SEQ ID NO: 7614 - DNA, 149 bp, Zea mays
aatagaacccgccgtccacgccaggattttctgagtcttggaaacacttacaccgagacccctgctgtttcctggaattgatgccccgtccagagcgttataaatcaagactagttaagtgcccgtgcgttgcgacggcacgcaaatta

SEQ ID NO: 7615 - DNA, 172 bp, Zea mays
ttcaaggaacacgacggtcagtcggcgagctggtaagttcggatagggatggccaaaatacgattggtgagttgagcaactccgatgatttgacgacatttaaaaatatggcgagcccagcaaactccatagtgagctgggaacagctcccgatgacctggtgggacaggat

SEQ ID NO: 7616 - DNA, 157 bp, Zea mays
agtcgtcaccgtcgtctgggcagggcgtaacatatggctgtatatatatgttttgttttttgctagcctgctattttgtctgttgatagagactctctcgcgctaggacctggggcctggtgcgctgtcgtgctatgctgggtgggcggtctcggcc

SEQ ID NO: 7617 - DNA, 122 bp, Zea mays
cggaattcaactctttgccgagtgccaaatattttgccgaccctcggtaaaagaaaacactcggtaaagaagctatttaccgagtgttttatttttgacactcgacaatgagtttctttgcc

SEQ ID NO: 7618 - DNA, 169 bp, Zea mays
ggtgtaaacgtgcaatcaagccgatctggtgcattctaatggtgattgttattttacatttaaccccttccacctaaaacttagtgactaatttacatttaaccacttccatatgaaaccgatggatataaattggatgctctggatggtttgattgcacgcttgcacc

SEQ ID NO: 7619 - DNA, 146 bp, Zea mays
cagctctagggactgttggttcgttgtctaatttgctacattttacttaatttttttatttaagcatagtttttcaattcaaacgacgactaattttatgtaaaatatgatgcagttagccacgaaccaaacatatcctagagtag

SEQ ID NO: 7620 - DNA, 151 bp, Zea mays
tagtttcgttttgctgaaatgtgatagcttgtttagctcgcgagttggctcattaacgatccgagctaagatatgtactttgctcatgaaaaaaattcaaacgagtcaatctaaaccgaactgaccacgaatcaagcaaaccaacgagaca

SEQ ID NO: 7621 - DNA, 139 bp, Zea mays
gcactcgacaaaggttgcttctttgacgagtgtcaaggccacaacactcggcaaagaggctttaccggtgcccaggtgtgccttctttaccgagtgctatgcccttgacactcggcaaagaacctcttttctgagtgtt

SEQ ID NO: 7622 - DNA, 195 bp, Zea mays
acgtcctcgcgcgagtgcgtgtcccaggtgtcagccaccacggctagtcacccggctgctccggtccgtcagtcaagacccagcactcgcctttcaccgctcccggtccatcagcacgagcccgcatgacattcacctcagccgtcgaccaccgtccctgtgctccacacctgcacaccacaagccgaccgacat

SEQ ID NO: 7623 - DNA, 94 bp, Zea mays
tttctacagcctcctctaggaagttagcttttaattgttgatccgcgggtgtggtcaaacgagccgctaacttcctacggcagactctaggaag

SEQ ID NO: 7624 - DNA, 198 bp, Zea mays
ggcacaaaagctaccccgacgatggcgagtggtcattgttgtcagtcctcctctgcgtcacctccggcgccgagatgacgccataatccttaatatagtagtcgtcgaacgcgcgcgacatggtgagtatcgataactcttggttgggctgccaaatgaagtgcaccccgtgctcatcaacgaggtagtacacctggt

SEQ ID NO: 7625 - DNA, 150 bp, Zea mays
caggttggacggtcgagtgggatgttgctccggcaggagaggagcacgaggagtagtgggctaggccttgcccatttcctcgacaccgacgacatcgattatccgctgcattttattttgtgaactcttatttgctacccaaaaactccg

SEQ ID NO: 7626 - DNA, 124 bp, Zea mays
agacgcgcacaaggcctccagagcggtggacggtagaactaagcaaacgtgaaaggcgacctaaagccgccatctcagccgagtgagcggcgaggaccggcgctgggaagctttgggatctcgg

SEQ ID NO: 7627 - DNA, 80 bp, Zea mays
actgttgattcacacaattggtcatcgcgcttgggttgaaagccagtggcgcgaagctaccgtgtgcccggatatgactg

SEQ ID NO: 7628 - DNA, 91 bp, Zea mays
aggggcctcaccagcggggtgctggttggcgatgttgtgtacctgctgctggctgcggccgtcccgaccgggttccgtctgtgaaggcctt

SEQ ID NO: 7629 - DNA, 79 bp, Zea mays
gggtgccgtcggacataagccttcggccgtcggaaatagcttatttctgacggcttagggtttatctccgacggcttta

SEQ ID NO: 7630 - DNA, 222 bp, Zea mays
gtagtggtcccgcttctgccgcttggtgtcgaagtcagtgcttgacccccctgttatcatgtgaatgactccgcgatatggttgatcggcgaagtcctcctgctttggggcatgggggatgttttgttgttgctagtgtggtggtgggggtgggggaggtacgatttgtacttcctgatggtgttggtaggcgtggtgcggtggatgcggagcaggagcgtg

SEQ ID NO: 7631 - DNA, 75 bp, Zea mays
tttagcctctcagcctggcttcacagaaacgagatcagagtccatttcctgggagcctggctgctcgtggcgcaa

SEQ ID NO: 7632 - DNA, 213 bp, Zea mays
tattttttctcatgcagtgtatgtgacttgaaactttgttaggacatagtttgtgaaagggaaatggacccaacatttcctatagtcgattttggtatttagcatccatcacaaatgattatgaacagaagctatgtacttgtctggattttgtatatcatactgtatctatttttactcccgtcgcaacgcacgggcatgtaactagtaagt

SEQ ID NO: 7633 - DNA, 95 bp, Zea mays
ttggactatactaccgctgcttttttgcctgtgttgttgaaagcgtataccatatggctgggacaggcaaaccagagacgctagccaaaggcttg

SEQ ID NO: 7634 - DNA, 127 bp, Zea mays
ttacactcggcaaaggctttgccgagtgtaacactcgacaaagaacactcgacaaatatttcatcggcaaagggttctttgccgagtgtttttttcggacactcggcaaagactttgtcgagtgtaa

SEQ ID NO: 7635 - DNA, 88 bp, Zea mays
gtgagattgctccggtgaagtggtcgagggcgtaggggaggtcttgacggtcacgccgatgtgcggatcatttcccgggatggttgga

SEQ ID NO: 7636 - DNA, 103 bp, Zea mays
ctttatcgagtgtgacactcgacaaagaagtctcggtgaactgtacatcggcaacagcttctttgccgagtacgttttgtcaggcactttgtcgagtgtcagg

SEQ ID NO: 7637 - DNA, 85 bp, Zea mays
taggccattccggaaagttgatgagcagacagttgaacacgctgatttttcgggcatctgatgcttctagcttccttttaatcgt

SEQ ID NO: 7638 - DNA, 142 bp, Zea mays
agtcttagagtctgtttggttcgctgtctaacttatcataatttgcctaacttttctacctaagattagttttttaattcgaactactaatcttaacaaagtgtagcgtaattagccacgaaccaaacatagccttaccttt

SEQ ID NO: 7639 - DNA, 71 bp, Zea mays
tttgctcggcgccataggctgtggcgctaaagtaatactgcttagcgccacaaaccatggcgctgaggtac

SEQ ID NO: 7640 - DNA, 85 bp, Zea mays
aggctagtacctcagcgccatggtttgtggcgctaagcagtattactttagcgccacagcctatggcgccgagcaaaggatctaa

SEQ ID NO: 7641 - DNA, 84 bp, Zea mays
actagattgggagccacaaaaccggaggaggctggggattgtagcccctctaacctactttggttctgtggtttccaaactagc

SEQ ID NO: 7642 - DNA, 90 bp, Zea mays
ggtgctagtttggaaaccacagaaccaaagtaggttagaggggctacaatccccagcctcctccggttttgtggctcccaatctagttct

SEQ ID NO: 7643 - DNA, 125 bp, Zea mays
cggaatttggctctttgccgagtgccatattctttgccgagtgttttttttcgggcactcggcaaagaaactctttgccgagtgtcacacaaaaaaccctcggtaaaataaaacactcggcaaag

SEQ ID NO: 7644 - DNA, 261 bp, Zea mays
ttgctcagcagagacttggtcgtccgctccgcctcgcagggttgctcggtagagacttggtcgtctgctctgcctcgcgggattgctcggcagagacttggtcatctgctctgcctcgcggggttgctcgatagagactttgtcgtccactctgagacttggttgtccactccgcctcacggggttgctcgactgatacttggtcgtctgctccaccttgcggggttgctcgagaaagacttggtcgtctgctccgcctca

SEQ ID NO: 7645 - DNA, 70 bp, Zea mays
acatcattggatcattggcgggtggctgagcctgacaagagactggctttccttggtggtctgtgagaag

SEQ ID NO: 7646 - DNA, 188 bp, Zea mays
cggtggagatggacgcaatcggacggtcgagatagaggcgggggcacggttgtgcctggtctacactatcgtcttaagtattagtagagatttaagggtttagagttgtacgatacagtctttagctgtcttttatacttaaaaaaacaattaaaaggctcttagcagtcacaattgtaaatagggta

SEQ ID NO: 7647 - DNA, 73 bp, Zea mays
ggttaattggtccgggccggcccgggcatgactccaactgggccgtgccgtgcttgggccgggccaaaaaacc

SEQ ID NO: 7648 - DNA, 70 bp, Zea mays
gcccggacacggcactaaaaagcacggccaggcaccgcacggcccgttccttttagtgccagtgccgggc

SEQ ID NO: 7649 - DNA, 112 bp, Zea mays
atttgggagtccaaaaatcggaggaattggagggtctaaaatcccccttattcaaattataaggagggattttagaccatgcaatcccctccggttttatggctctcaaact

SEQ ID NO: 7650 - DNA, 137 bp, Zea mays
gaccagccctactcacacgaagccgagccccttcctccgtgctaaccctatgctttgcaaccgcccttcgtcgtcggcgcccggtgctaggacctggcacgtctggcgcgtccgcggcgtgtggcgtagcctccgcc

SEQ ID NO: 7651 - DNA, 175 bp, Zea mays
ttagcccctatcacatcgaatgtttgaacctccgttcggggtattaaatatagtcgaattataaaactaatttctcagccgaagattaaaaagtgagacgaatctagtacagttggttgggtctatatttcatactcctatttgaaagtcaaacgcttgatatgacccgagctaa

SEQ ID NO: 7652 - DNA, 71 bp, Zea mays
aacgggcttggcggaatcagcggggaaagaataccctgttgagcttgactctagtccgcctttgtgaaatg

SEQ ID NO: 7653 - DNA, 73 bp, Zea mays
ttgcgctccagctaaaatctgattctgcttgtaagtcatgcagtggcggacccagaaattggctaaggcccgg

SEQ ID NO: 7654 - DNA, 238 bp, Zea mays
gcagttccgtacccccccccccccccccaaaaaaaaaatcaacgcacgccgtacacgcatagcatataggcataaatctaaagagaccgcgcaaaaacacctgcatgtccaaaccagtcaactaatcacgcgattattgcagcgcaaaagcgcgaccccataggaaggacgacggaagcagccgcacaaagcaagcgaaagcagaggccatggcccatgggggggggggggggggggg

SEQ ID NO: 7655 - DNA, 143 bp, Zea mays
acatcatcggatcattggcgggtggctgggcctgacaagagacggactttccttggtggtctgtgaggaggattgtcttgtcttcacaactaatgatacctttgtgtttagtcaaccaatccatccctaagatcacatcaatc

SEQ ID NO: 7656 - DNA, 252 bp, Zea mays
cataggtcatgagtgggaagcagaccggtgcccacaatgtgactcagtgccaggcgtggttaatgcagtcagtcatttatggcgggtcaatccagggccgagagtgggattcactcgagtggttcccttctgacacgctcatcctcccttgtcaggcttcgccatgtccggcctaggctcggtgccacggggttcgatcgagggcgggtccttatagggttggcgcacctgcctcttccgactgactaatgg

SEQ ID NO: 7657 - DNA, 149 bp, Zea mays
tatatattatgcctgggtgcattcaatatagagaatacacccaggtgcattttagtgctgtcatataatatatatatatatatactgtttttatatattacacctgggtgcattcaatatagagaatgcacccaggccgaacctacgcg

SEQ ID NO: 7658 - DNA, 101 bp, Zea mays
ccatgccctacctgtctgacatccacggatacttggcttgggctgtcacttaaatcagtactaggtgagtactcgtgcgttgcaacgggaacatataataa

SEQ ID NO: 7659 - DNA, 172 bp, Zea mays
caacaatcttgagaagaaggctcaagcaaatgagaataggcaagacaatgtgaagcaaaatttgggtaaagaaaagaaaactcaaacaaagagaatacatggtcgggaaactgaacacatggcaaatacatgtcccctaggtaacatttctaagcctatttcaattcatgat

SEQ ID NO: 7660 - DNA, 155 bp, Zea mays
gaggctctggcatgtgtctgggaagcggtgtccgatgaaggtaatttggaaaggagggtggtttgggtagttccggctttctcccaagtagactgccatagagcatttttccattccattttcacggtactccttccagacgtattcgggcttct

SEQ ID NO: 7661 - DNA, 71 bp, Zea mays
actttggaagccacaaaaccggtgaggattttagccccttcaatcccctccggtttttggactctcaaact

SEQ ID NO: 7662 - DNA, 94 bp, Zea mays
ggggttaggcgccatagatcttggcgcctaccccctgtacacgtggacatacggtttacagagatagactccaagatctatggcgcctacccca

SEQ ID NO: 7663 - DNA, 102 bp, Zea mays
cggcaaagcctgtgacactcgacaaagagagctcggcgaaccgtacatcggcaacggcttttttgccgagtactttttatcgggcagtcgacaaaaaaaaag

SEQ ID NO: 7664 - DNA, 80 bp, Zea mays
agctgtcgtcttgctgggttgctcgacgggcaggttggtcggcagcctcatctcgctgggttgctcggcgggcaggttgg

SEQ ID NO: 7665 - DNA, 102 bp, Zea mays
tgagtttgaatccccttggggccatgcgtattttttaattttagctagacgtcggctgtacgggggaatgagaatgagctttgcggggaggatgaatgagaa

SEQ ID NO: 7666 - DNA, 150 bp, Zea mays
ctacggttttagggtctgtttggttcgctacctgacttgctacactttgcttaacttttctgtttaaggttagttcttcaattcgaacgactaaccttagataaaatatgacctagttagtcacgaaccaaacaggcccttaatccaact

SEQ ID NO: 7667 - DNA, 199 bp, Zea mays
cacatcctagcttggcaccaagatctgtggcaccgagctaggtgtcacgtcggttgccaccttgacccgtccacgccagtggagcaggcaccttggcaccatgggtcatcgcctagctttgtatcgttgttctctcttctcgatcgtagtgccacatcctatctcggcgccaagatctgtggcgccaagctaggtgtca

SEQ ID NO: 7668 - DNA, 185 bp, Zea mays
tagcttggcgccacagatcttggcgccgagataggatgtggcactacgatcgagaagagagaacaacgatacaaagctaggcgatgacccatggtgccaaggtgcctgctccactggcgtggacgggtcaaggtggcaaccgacgtgacacctagctcggtgccacagatcttggtgccaagcta

SEQ ID NO: 7669 - DNA, 191 bp, Zea mays
tcctagcttggcaccaagatctgtggcaccgagctaggtgtcacgtcggttgccaccttgacccgtccacgccagtggagcaggcaccttggcaccatgggtcatcgcctagctttgtatcgttgttctctcttctcgatcgtagtgccacatcctatctcggcgccaagatctgtggcgccaagctaggt

SEQ ID NO: 7670 - DNA, 131 bp, Zea mays
tggcgagtgttttttgacactcggcaaagtactcgacaacgaaccatttgccgataaaacatttgtcgagtgttctttgccgagtgtaacactcgacatagactttgccgagtgtaaaaaggcctttgtcg

SEQ ID NO: 7671 - DNA, 173 bp, Zea mays
actattaggtgagtgtccgtgcgttacagacctgagtttctctttgatatcattccggatggcttgtggatattgtcatccatctcataatcgtataacacatatttgtatatatataagttatcgagatattatatgttccagatgcaatgcacgaacacttacctatctta

SEQ ID NO: 7672 - DNA, 141 bp, Zea mays
ttcccctattagggctgatttggtgactcgggatctcaagaggattggaggggattgaggaagaaattagtttatttccccctcgatcatctccaatcctctcgtgacccccttgtcaccaaatcaacccttaggatacgt

SEQ ID NO: 7673 - DNA, 73 bp, Zea mays
aaatgagccgacgggctggcccgacacagtcagcagacctgcatgacgtgccaggccgccgcttggccatcta

SEQ ID NO: 7674 - DNA, 142 bp, Zea mays
agtgttggaaaaaaagcactcggcaaagagctctttgccgagcgttgtatttctgacactcggcaaatagctctttgccgagtgtcaaaaataaaacactcggcaaagagcttcttggccgagtattttcttttaccaagag

SEQ ID NO: 7675 - DNA, 126 bp, Zea mays
ccggtgcgcctgtagttggtctttgcgcggacaggttggtgtagggtttatctcgggtagtcttttgaggaagacttcgattctgcgcacttgttgtgcttagtccggctgcacccttacgcgatt

SEQ ID NO: 7676 - DNA, 148 bp, Zea mays
atgctgccacgtggcttgttgcccgtgacgtaagccagcgagcggagcctgacgtaaggcctctggccgcgcggtctctgcatttattgcggagaggacgcgccgcttgtccaccttactgacaggcgatgtgccgcctcagcattta

SEQ ID NO: 7677 - DNA, 79 bp, Zea mays
tggagatcgcagctgttgctatcacctcttttacactaagatatcgaagaccgcaactgctgctatcaccgtttaaagt

SEQ ID NO: 7678 - DNA, 77 bp, Zea mays
catggtcatacgtggtcgtgcgcgctttccgtgtgctccctcgcacgtgacgcgcgctattcccacgtatggcgctc

SEQ ID NO: 7679 - DNA, 147 bp, Zea mays
ttatatcataagggcccgttcggttgacagggaatggaataccggaactattcctacccagattgtttctctaatttgtataagttttgatcaagaagaacaattcttggtgcattcctatggaaacgaacggacctaaggcttaat

SEQ ID NO: 7680 - DNA, 91 bp, Zea mays
gggaggtcctggcggtcacgtcgaggtacgactcgtcgacggtgatagccgatatctgttgtgccacgtgcgcaggcggtcgggctcgtcg

SEQ ID NO: 7681 - DNA, 152 bp, Zea mays
caaggactgtggcagacagcaaggactgcggcagacagcacagcagtagtcttttgactgcaaggacagcgtgttgcaggcatctacttttcattttccagcttttggaggacagcaacttgctgcagtttttcttttgactagagtacaac

SEQ ID NO: 7682 - DNA, 159 bp, Zea mays
cttgttttcatatataggcctatttggttccctgcctaacttgccacactttgcctaacttttctgtctaaggttagtttttcaattcaaacgactaaccttaggcaaaatgtggcatagttagccacgaaccaaacaggcccatatacagcacaatac

SEQ ID NO: 7683 - DNA, 72 bp, Zea mays
atgagtgttccactcgatcctaggctggctggctttctggcccagctttgatctaggtttgacgaacagacg

SEQ ID NO: 7684 - DNA, 215 bp, Zea mays
agggttactgcttccgcaggagaggacaggaggagtagcgtggccaggctcgccatgttactcggtttctcgattatttatttccgctgcattaaaacctattgttattatttctgaaactccgataatgtaatcaatattgatacttattaaatttgtggtattatgttttattgtatttctctgtgcctcaccttcgagtgagctagtagtat

SEQ ID NO: 7685 - DNA, 188 bp, Zea mays
cggcaattaagaaggttttgccgagtgtcaagcttccggtgaaaaacaatgctcgacaaagggctgtcagcagccatctataattaatggctgttaattttgccaagtgtcagacattgatactcgacaaaatatcttctttactgagtgtcacctgacaaacactctacaaacctttatgttgttga

SEQ ID NO: 7686 - DNA, 140 bp, Zea mays
aattcattcgagggctgatttggtgacaaggggatcccgggaggattgaaggggattaagggggaaatcaactaatttccttctcaatcccctccgatcctcctgggatcccgggtcaccaaatcagctccgaaagggat

SEQ ID NO: 7687 - DNA, 69 bp, Zea mays
tggacccacctatgggtccgcccctgcctggtgctcgtcaaaggcccggccggtacctagttgcaccat

SEQ ID NO: 7688 - DNA, 170 bp, Zea mays
actattaggtgagtgtccgtgcgttacaggcctgagtttctctttgatatcattccggatggcttgtggatattatcatccatctcataatcgtataacacatatttgtatatataagttatcgagatattatatgttccagatgcaatgcacgaacactgacctatctt

SEQ ID NO: 7689 - DNA, 211 bp, Zea mays
taccggaatcgcgttcttttgccgagtgtctaagacttgacaaaggccattttacactcgacaaaagctttgccgagtgatacactcggcaaacaataatcggcaaaatatttggcactccgcaaaggctttactgagcttctttgccgagtactcgaaaaaacacttggcaaaatatttggcactcggcaaagaagcaaatttctggtag

SEQ ID NO: 7690 - DNA, 82 bp, Zea mays
gactaagctgcgccgccgaggggtttaggactgcctattgaaggtggtgttgtactctatgagccggcgatgtgatatttac

SEQ ID NO: 7691 - DNA, 139 bp, Zea mays
acggcgggaacgccacataacagtgggagcacatcacggccgccgggagtcctaggaggtcttcgacttcacctcccgacacataaaaccaataatcataccagttgccccacttgttgcgggcgcagggaactagttc

SEQ ID NO: 7692 - DNA, 82 bp, Zea mays
ctcgtgtcctccggattggttcctaggctggaatgagtgggccactgtttcctggtctagaactgtttccggcgtggaatac

SEQ ID NO: 7693 - DNA, 98 bp, Zea mays
gtgttgtatttgtgacactcgacaaagagtcctttgccgagtgttaaaaaaagacactcggcaaagaaactctttgccgagtgtcaaaaataaaatac

SEQ ID NO: 7694 - DNA, 131 bp, Zea mays
aaggcaaagagcttctttgtcgagtgtcagggctatagtactcggcaaagaaggaacacctgggcaccggtaaagcttctttgccgagtgcagggaccctgacactcggcaaagaagcaagctttgccaag

SEQ ID NO: 7695 - DNA, 165 bp, Zea mays
attttcttactaggtggatgcccgtgcgttgcaacgggaagataaaatatcacaataactcatgtacaaatgtgttataatattatagaaaaaggttacaaatgtgttataatgtttaggaaagaaaacaaagccactgcctgtgcattcactgggacctgaaaa

SEQ ID NO: 7696 - DNA, 116 bp, Zea mays
ctaaacaaggctttagggcttgttcggttggaaagtggtcgaaggggattgaatccctttctagtaatccctccaattcctatgcaaccgaacaaggccttaaagaggcaatatac

SEQ ID NO: 7697 - DNA, 74 bp, Zea mays
tctcacggacagcgtcagcatgttgcgtccgaagtctctcgacttcggcagacaaagctgtcgtaagggccccc

SEQ ID NO: 7698 - DNA, 145 bp, Zea mays
  unsure (64)..(65): n = A, C, G or T
atccgagcccggggtggggtggggggtgataacgctagctgcagaagctgtcggcggtgatccnnaggaggaaggcgccgcacgcgcgcagtggtccaccctcctgcttcactttccctccctccctccctccttagcgcgcacg

SEQ ID NO: 7699 - DNA, 82 bp, Zea mays
ctctggtgcaggctctggtgctggatccggggctacctcctgagcagctccttgctccggcacgaggacctactctccgtca

SEQ ID NO: 7700 - DNA, 250 bp, Zea mays
ggttgccatggtcgtgctgcaccgggtggatctggatctgggtagagcagtggtttgaggtgcttcagatcggagaatggggctcggtagtggcagcggcagcggcggcggtggaggtgaagcctaaggagatcgccggtggaaaggcccgtccgtcgccgtcgtgcctgctttcccgcgctcactcacgtctcgtgtaaccaccgccgttgaaaccctagtcctctcgtgcaaatcggccgccgcgatc

SEQ ID NO: 7701 - DNA, 246 bp, Zea mays
ccacagcaggaggcagagcaggcagcgcagcagcagccggcgcctcaggacgacgacgaccagcaggacgacgacgaccagtagcaggacgcctcaggttcaggcggctctagttcgaggagcatctacctgcgaggccccgcgagtctcccgccgcgtcccatacttcgggacagacgaccgttgattcggccggaaggggagaggtatgtaactttatgttcttcattcttgttcatattatgt

SEQ ID NO: 7702 - DNA, 128 bp, Zea mays
taaaaagtaaaataccctttgccgagtgccggatctagggcgctcggcaaatattatttttaaataataaaaaaactctttgccgagtgccagatcgcgggcactcggcaaagaagttttacatatac

SEQ ID NO: 7703 - DNA, 148 bp, Zea mays
atcttattaagggcatatttggttcgctgcctaacttaccatactttacctaacttttttgcctaaggttagttcttcaattcggacgactaaccttaggcaaagtatgacacagttagtcatgaaccaaacaagccctaagtcttgg

SEQ ID NO: 7704 - DNA, 256 bp, Zea mays
atctcggcatcgaagcccatgtgagaacgaccacgaccggggctgagccttagacctgtgctttggcttgtgtcagacgaggggatttttttaaccacagtctgatattcgctcccacggggagtcgaactcaggacctgaggagtgctactcagaccacctaactaactcagctagaggctcttttcgcaagcatgatgaacatagaagcttctctttctcagattgtatctactatgggtgcagactagccaac

SEQ ID NO: 7705 - DNA, 152 bp, Zea mays
tgctgcagtccggttgcaaaccaaaatgtttgcagcctctcacaaaaaggagaatagatttcacccgcagaagcaataacacaactaagtgatgtctatcttcctttttatgagggactgcaaacattttagtttgcagtcggactgcagca

SEQ ID NO: 7706 - DNA, 88 bp, Zea mays
tcttgctgagttgctcggaggacctgttggtcgacagactcgcctcactgggttgctcgacggacaggttggtcggcactcggcagcc

SEQ ID NO: 7707 - DNA, 213 bp, Zea mays
ctcctatctgacacgcagtggcggagcacccattatgacctatggctaaagctatatctaaaaataatgtttggtgtagtgataagtacatactacttgcagtcaataggttagaagttcgagttctacgtgttgcatcatttttttttcttttttattcttcttcagtcatacctaattattattctgtcctccgccattgctgacacgggc

SEQ ID NO: 7708 - DNA, 142 bp, Zea mays
tagggcttgtgagccacaaaaccggagggaattagagaggggctaaaatcccctccttattcaatccctccttattcaaaattgaatatgaagaggattttagccctccaatcccctacggtatttggactctcaaactagc

SEQ ID NO: 7709 - DNA, 148 bp, Zea mays
agggctagtttgagagtccaaataccgtaggggattggagggctaaaatcctcttcatattcaattttgaataaggagggattgaataaggaggggattttagcccctctctaattccctccggttttgtggctcacaagccctaaac

SEQ ID NO: 7710 - DNA, 75 bp, Zea mays
acctcgctgacggagagtacgtcctcgtgccaaagcaaggagctgctcaggaggtagccccggatccagcaccag

SEQ ID NO: 7711 - DNA, 163 bp, Zea mays
ctcaagaaaccacgggcgcgggaaggctcgtcgactcgtcgtcacaacatatatatatgactgaaaaaaaaagctcgagttaaatgatcagactccataactcagttcggttcgaactagctcaacgaagtctcggctcgactcggctcgtgagctggctcgt

SEQ ID NO: 7712 - DNA, 243 bp, Zea mays
acgccgatcaggctgcgttggtaatcgaccgagttatggcattggctgagcactggctgcgccctggcaacatgacgcagtatttgtgtcgtacgaacttggttgcgtcatgtgattgctatatcgcactctcacttaatcggatcactcctgttaagttggacctccatcgccgagtcacatatttttcgcatgccctgtaggcactgttcgtctgtcgttatcatcgagccacaattgcgc

SEQ ID NO: 7713 - DNA, 141 bp, Zea mays
gggccgagagggggtaattgtggcagaacctccaagttattgggcccacatgcacttgtccttgtcccaaagacctcagacaaccatgcatgtgcaccagataactcaataggatctgtccgattgccccaaggacatcgg

SEQ ID NO: 7714 - DNA, 246 bp, Zea mays
ctgcaggcatgcaagctttgccgagtgccacagatccgtaataggccattagctgacaaagggacccgctaagggcttcttagaaggcgcttcctggtcggcagacactcggcaaaggtaacttctttgccgagtgtcacctaggacactctggcaaagacgccgtctccgtcactccggcgccgtgacggcggcttttctttgttgagtactgtctggcactcggcaaagtctgtgctgagtgcc

SEQ ID NO: 7715 - DNA, 121 bp, Zea mays
ggactgaaacgactgagtgcagggcgaccgggtttactctctttccgccttctatacggatcggaggccatgacaccacaagaaataaaacatgggtccccgcgaacagtcccttcagccg

SEQ ID NO: 7716 - DNA, 108 bp, Zea mays
aaatcctcacgctcaccattctctattcgatctcgtcgtccagctgaaggccgtcgtcgttcaggcaactaccaaatcgagttgtgatgtggtgagccgattcgctat

SEQ ID NO: 7717 - DNA, 79 bp, Zea mays
gttgtcgatgttccaggagtgctccaggtcctcgccgtttggcgttgtgagcctgtaggcgctgagggatgcttttgtc

SEQ ID NO: 7718 - DNA, 74 bp, Zea mays
cgcagatactcgtcagggctttgtccagtgcgcttccgctccccgctcaggcggagacccgatgctgccacgtg

SEQ ID NO: 7719 - DNA, 175 bp, Zea mays
taaatttgaggaatgaacccatgatgcaccacctcaatttggatgtagtgattctttaaaccaaaacacccccctttaattccttaaaccaaacacactctaatggtgtgtttggtttgtggagtcactctattcttcatgaggtgatgcatcataagtttattccatcaatttt

SEQ ID NO: 7720 - DNA, 109 bp, Zea mays
caggacatagggttaggttttggggttttgggcccctaagaacatgttcgtttaagtaaatcccggtcagagttagacccaattccccgtggatcagcccggtctggaa

SEQ ID NO: 7721 - DNA, 73 bp, Zea mays
gctcgttttatggtcagctcggctcggatcaactcgtttgaatttttcacgagctgagctgacatcctagctt

SEQ ID NO: 7722 - DNA, 107 bp, Zea mays
gtagtctggagaggcgtcctcagcgacggactcgggctcaagttctctggaaagggacgcctgggagggtgagagctccgtccgggctcgggaccctgtcgcaccac

SEQ ID NO: 7723 - DNA, 122 bp, Zea mays
cttgccaccgggttggactgtcgagtgggaccctgcctcggctgaggaggagcatgaggagtgatgcgacttgtatctctatctctccaattattcaccgttagtttattgccgctgcactt

SEQ ID NO: 7724 - DNA, 99 bp, Zea mays
cgtcgagtgtctgctagactagccgctcggcaaagagggttttattggacctattggctatgttctttgccgagtggctgctgtactagcgctcgacaa

SEQ ID NO: 7725 - DNA, 118 bp, Zea mays
cctgcttattaagggctgatttggtgatccaggataacgggaggattggaggggacccctcaatcccttccaattctctcgtgatccccttgtcacaaaatcaaccctaagggaaaaa

SEQ ID NO: 7726 - DNA, 210 bp, Zea mays
acgctcttctggttacgcaaacagtctctcaaacgagagcagacctccgaaatcgccgtcggtagagctacacttgcacaggtgtgcgggcgattagttttttgggaagcatactcgcgattgctcgctccatccgctcgaccaacgccgattcggttcttcgttatcgacgtcgttcgagggactgcactgcgtaaacctgtctgcatt

SEQ ID NO: 7727 - DNA, 194 bp, Zea mays
gtttccagaccgtctccgcttgggtcggctcggctcgatcggttcatttatggcctgtttggttgtctggatgggtgggcctggctcgtatctagggaacctggctcttgatagtctggccgagagcatgcaatatccctatgtttggttgcctgtatgagcttagcatggcctatgcgagatgatgtttggtt

SEQ ID NO: 7728 - DNA, 256 bp, Zea mays
gaagagggctggattgcggccgcctgcgtcgcaaccgagagccgcaccgccgccgaggctgcagggacgtcggcgccgacgctgttggaggggttggtcgccatggggtgggtgagtgggtgggaggcgagtcgttggaggaacgcagatgcaagagcggcggacacggctataccgttttactggattgaatgggcgtttcgggtccgcctatccacacgcgtcgtgacgctagcgctgcaggccgcgtgaaaca

SEQ ID NO: 7729 - DNA, 150 bp, Zea mays
attctgctccagggctgatttggtgaccggagaaatagaggagatccatgagaaagaatatatatactattcaaaattaaatagcaaggggattcctcctcgtggatcctctttatttcctttatcaccaaattaacccttagttctctt

SEQ ID NO: 7730 - DNA, 137 bp, Zea mays
atgcaattcctcggcacctccgcatcagtccccctcttcggtgtcgtcacccgcgcacctcctctgcctctcgtggtccccgtccttcccgcacctccgccgagaccctggtcctgacgtcccgactgttgctcctc

SEQ ID NO: 7731 - DNA, 160 bp, Zea mays
agcgtgcttggcttggagcaatttgggatgggtgaccgaccgaaaagtttttctcgggtgcgcatgagtgaggacaaagtgcacacaaaagactcgtgttggtctatggggacagatatatgatcctagagagctgccaggagtaagtgccgctggtcca

SEQ ID NO: 7732 - DNA, 75 bp, Zea mays
tatggcccttggcgcatggctgggcgttgggtgaagtgtgccctcgccagatgcctttccatggtggaagggtgg

SEQ ID NO: 7733 - DNA, 110 bp, Zea mays
gggagcgggccgagactgcgagggctcaggtaacattgttgtttgtttggcgtttgctatatgcaggctgtgcgtgtgtttgctgaatctgtgtgtcttgtcctaggcgg

SEQ ID NO: 7734 - DNA, 202 bp, Zea mays
cgctgtgtacgtgagttctgatcctggcacgtacatagttcgcattcggtttgccttctaaaactgggtgtgacagcgaagtcctgccttcgcactgaatttgcgaaaccgtgacccggccgcctttgtgcgtgatgctgaggacttggcggtgcggctcgtggggcgttacgtgccgaggacggaaggccagcgcagcttt

SEQ ID NO: 7735 - DNA, 73 bp, Zea mays
tgtaccttggcgccataggctatggcgtcgagatgtgttacctcggtgccataggctatggcgccgaggagag

SEQ ID NO: 7736 - DNA, 93 bp, Zea mays
aatcatccgagagagtcgggcttccgaattcgtattcgcgcgagcgacgaattttaaataatcaccggacgcaccgattttcgaaatgactat

SEQ ID NO: 7737 - DNA, 100 bp, Zea mays
ttgccgacgactcttttgcggccgtcggacataagctatttctgacggcccgtcagaaataaccttatttccgacccgttgcgatcgagggacacaggtg

SEQ ID NO: 7738 - DNA, 156 bp, Zea mays
cactatcatcctctgccaccgcaaacggtgggaatgccatataacggtgggagtcattacggccgccgagagtcctgggaggtcttcgacttcgcctcccgacacataaaccattatcataccagtcgccccacttgttgcgggcgtagggaacta

SEQ ID NO: 7739 - DNA, 83 bp, Zea mays
gggtctagggctggaaggcactcgcattctctcgcccttttcggactaacgcctggtgcgggtgcctctcggattggagctgc

SEQ ID NO: 7740 - DNA, 114 bp, Zea mays
tttgctgagtgccaaacactcgacgaacgacgaacaaggaaaagggccttctgcagccgtctatacctgacagctgttacctttgtcgagcgccggtctttggcactcagcaaa

SEQ ID NO: 7741 - DNA, 92 bp, Zea mays
catatcatagtgatgtttgtcgtttcgatttttatgttttatacaaattttttttactaccgtcgcaacgcacgggcactcacctagtaaca

SEQ ID NO: 7742 - DNA, 144 bp, Zea mays
ccttctccatgaaggccagcttgtccgaggcatcttcgtagccttttatcgcgccatgagccctgtccttcgagactgcgtcaagcttcacccacatgcgggacgccacgtgcctggaccgcttgtcttccccagagttgtgat

SEQ ID NO: 7743 - DNA, 142 bp, Zea mays
accacctaaccaactcagctagaggccctttcttcacccacctagccaacagaaacacacatgtctatgttttatattctatacttaagtttaaatggaaattgtagcaatgtacggggcattttgctagtttaatataata

SEQ ID NO: 7744 - DNA, 153 bp, Zea mays
tagcttacttagggcatgtttggttcgttaccccaattgccacactttgcctaacttttctgcctaaggttagttattcaattcaaacgactaaccttaggcaaagtggggcacagttagccacaaaccaaacaagcccttatacttatctct

SEQ ID NO: 7745 - DNA, 79 bp, Zea mays
ttcattacaacacagtgcggcacaaagctaacttaatcacacattggggtcgttggagttgtgtccactatcttcagaa

SEQ ID NO: 7746 - DNA, 86 bp, Zea mays
acttattccgtgggtcggaagcggggcaccgcccctccttttggctccaagggcccggcctcgcgggccgatccggcggaagacat

SEQ ID NO: 7747 - DNA, 86 bp, Zea mays
tctatacaagcggtaagctttttacattacagacggttcggttagaaaactgtctgtgatgtcccaggcggttcggtacgcctgtg

SEQ ID NO: 7748 - DNA, 102 bp, Zea mays
gctggtctaagtgtgtctgagtctcgtaacgttgcgtgcctccccttttatagctaaatggggacatacaagggtgctgagccccgacatgcaggcccaggg

SEQ ID NO: 7749 - DNA, 75 bp, Zea mays
aattcaaacggaccgggccggtccgaaattcaaatattatggaccttttcgggcttgggccgggccgaacggctc

SEQ ID NO: 7750 - DNA, 162 bp, Zea mays
caatgcacgtagggtagtaatggactataaattctacactataaaaattaaggaccaaattagtttcagactctattcctattaatttttgaaataaattatattaaggaccctaacttattgtgaatggatcgtgatccattaccacctctaaacacatgc

SEQ ID NO: 7751 - DNA, 155 bp, Zea mays
aacgctctggcatgtgtctgggaagcggtgcccgatgaaggtaatttggaaaggagggtggtttgggtagttccggctttctcccaggtagactgccatagagcacttttccattccattttcacggtactccttccagacatattcgggcttct

SEQ ID NO: 7752 - DNA, 75 bp, Zea mays
gaggacgtggtggagtggaccgtgttgccggcatggtcgaggactggcgggacacgcgtctggtcgtggagatgc

SEQ ID NO: 7753 - DNA, 170 bp, Zea mays
aaccggtaaagcttatttgccgagaactgtggcccaggccctcggcaaagaagatccctttgtcaagtgtctccaagtgcactagtcaaagggactggcaagggtccactgtagcattctatgccgagagcccttccatcaggcactcggcaaagaagcccccttcgtcg

SEQ ID NO: 7754 - DNA, 177 bp, Zea mays
ttgccaaagaagccttctttgccgagtgcctgatatactggcactcgacaaagaatgctccagtggcccccttttgctaaacccttcgctgagagctccgggaggcactcgacgaagggggcttctttgccgagtgcctgatggaagggctctcggcatagaatgctacagtggacc

SEQ ID NO: 7755 - DNA, 72 bp, Zea mays
tcataccggctgtagaaggcactctacggtcgcaactatgtccctacagcgcctcctacgtatcggtcccct

SEQ ID NO: 7756 - DNA, 221 bp, Zea mays
gagaagccaggccactgtcgccagagttcaccaccccgcaagagtgtgtggaccgtgtaatccactgaaccattttccgattccctgtgcacacgcgtctctacgtcacccgtgaagctcaccgtgccattggattgaaccagatctccttgtgcacacccgccgccgacgcaggacacccgcttgcgcacgtggaccgagcgattctggccatccccgcc

SEQ ID NO: 7757 - DNA, 158 bp, Zea mays
tacctaagactatagacctattttgttcactgcctaacttgccacactttatttaacttttctaattaatgttagttcttcaattcgaacgcctaaccttaggcaaagtgtggcgcagtttagtcacgaaccaaacaggccctatatgatacacatgc

SEQ ID NO: 7758 - DNA, 71 bp, Zea mays
tgctataactaggtgagtgcccgtgcgttgtaacggaacatataataccacgataacttatatataaaatg

SEQ ID NO: 7759 - DNA, 74 bp, Zea mays
atggttgatggtctgacttggcctcccaccctgccaccgggttggacggtcgagtgggatgctgctccgacagg

SEQ ID NO: 7760 - DNA, 86 bp, Zea mays
gccgagtgcccatgatctggcactcggcaaagatttttttttattttaaaataagctttgccgagtgccagatcggggacactcgg

SEQ ID NO: 7761 - DNA, 182 bp, Zea mays
aattagacgcagccggctgcaaaccagaatgtttgcagtccctcacaaaaaagaggatatgccccacctgcaggtgcagcaacacaattaaaacgatatctgatagacttacaggtaggctctattctccttttttaagaggggctgcaaatattctgttttgcagccagctgcacccattt

SEQ ID NO: 7762 - DNA, 113 bp, Zea mays
tcgacgacttgttcgagcttttgtcgagcactttgtcaagctttgtcttcacccgattcttgggatttcttgatgacgcacggaacgacgacgagatcgagtcaggagcgagc

SEQ ID NO: 7763 - DNA, 213 bp, Zea mays
cgccatcctctgatcagccgccgcccgctccgccattatcctcgcatccatctcttgacgttccctcctctcttcttctagttgggtctgtaatattacaagccaacgttatactaactcaaagagaaggtatataactcaagaaaggacgagttacataagcactaacctcgagttgctgtatgcgatgctgtgagctgtcgtgccgaggtc

SEQ ID NO: 7764 - DNA, 79 bp, Zea mays
cccgaaaaaagtactagacaaagaaggctttgccactgtactgtttgtcgagccctctttgccgagtgcgacactcagc

SEQ ID NO: 7765 - DNA, 145 bp, Zea mays
cttgctctctaagggctgatttggtgatcggggatcccgaggggaaaaaattctcttgctattcaaaattaaattgtaaggtgattcctccgccatggatcccccttgggatcactaatcaccaaatcagttcctaaggggtact

SEQ ID NO: 7766 - DNA, 93 bp, Zea mays
ggcaaagggttctttgccgaatactttttttcggacactcggcaaagactttgctgagtatcaaaaagcactcggcaaagaaaagccctcggc

SEQ ID NO: 7767 - DNA, 76 bp, Zea mays
caaggacttcagccgacctcttcatcgttcaggcaactaccaaatcgagttgtgatgtggtgagctgattcgctat

SEQ ID NO: 7768 - DNA, 105 bp, Zea mays
taccctagagtgtgcagctctctggacacgtagtggtaccggacctgcccaggtggtgaggttggtgctattgctggcccagagtagtcgcacgacgcttgggcg

SEQ ID NO: 7769 - DNA, 109 bp, Zea mays
agagtgcgggccagaataaaatagtttttgcgaattacaagggcaaacagccctgatgagtcaaacaaaaaatttgcggaggttgtcgatgttccaggagtgctccagg

SEQ ID NO: 7770 - DNA, 194 bp, Zea mays
ggcagggcggcggcggcggttgctggcacgggcgaggggcgagcgttaagggtccggcggctgttcgcgccgaggggggtgagtaggcagggcgatggtggctgcaggggttgctcgctcgcacggatgggaggggctgacgaccaggggatgcacgcgggcgtgggcagcatccgacggacgacgaaaagaga

SEQ ID NO: 7771 - DNA, 137 bp, Zea mays
ctggcccgcgaggctggaggctagcaggacgctatagagatgtctctctagtatgcagcactagagatgctgctgtctctgttgtcctctaaaggaggatagtcaaaaggctcctgctgtcctctagatgctaaagg

SEQ ID NO: 7772 - DNA, 248 bp, Zea mays
tttttataacgttggatagtgcaaatttagactagaaaacatcaaaccaaaaaaaaatggagggactttctctctatcttgctactcgcgtctgtcggagttggccctcctttctccgcatccggcaataggggaaaatcacgatatgacttcccttagaccaactccagcaacactctctatcccactccgcatccgcattatacacgctctgagtcactatttcgctctccagcagcctccgcatc

SEQ ID NO: 7773 - DNA, 87 bp, Zea mays
agtagtatatgttcccgttgcaacgcacgggcactcacctagttattatgtaagtgcctgtgcgttgtaacgggaacatattataac

SEQ ID NO: 7774 - DNA, 129 bp, Zea mays
gtactgtcgaaggccatgagggactccctgtgtctgagatgtgctctcattattactctgcgtatccgccctttgaagtggcagaggaggatgcagacgaaaggggcccttcgtgcgccgcggtcagaa

SEQ ID NO: 7775 - DNA, 106 bp, Zea mays
gcctagatgggtcggcgtgccactgccgcggcccaggcacctttcttctctttttaatctgttagtcgtgccgggccggcccggtggcactatggcccttataatg

SEQ ID NO: 7776 - DNA, 216 bp, Zea mays
tgcaagcagacgttaggtgcaagcgtgtaagcagctcaattggtgcattgaatctagatctaaccgtatgtgtaatcgtgatttgttagggttttttataaagttaaacgagatggtggtggaaggatttaaacgttaaatatagcaatacggttagatctaaatctaacggaccaaaagacatgtttgcacacttgtatataatggctgcttgca

SEQ ID NO: 7777 - DNA, 84 bp, Zea mays
accggaatttggctctttgccgagtgtcatattcttttctgtgtgttttatttcgggcactcggcaaagagctcttttgccgga

SEQ ID NO: 7778 - DNA, 226 bp, Zea mays
aagaaggatctgttgtgttgtgtttatgtgtaaactcacccgatgtggccgtgctgttcgcggcggagcggtcgcagcgggcgttgcgggcgtgcggagcggtcgcggcacacatgcgggcgcttcgcggcggggttcgcggcgggcgtgcggaacggtcgcggcggggttagcggctggcaggcgggggtagggaggcgggggcagtctacaataagctcttaat

SEQ ID NO: 7779 - DNA, 197 bp, Zea mays
ggaccccatacggtggttgcggtggcggcggctccccgactcgaacacacggtggtggcagttcctcgattcagagcgacggcagcggttcccagatcggcgacgcagtggcggcgactccccgatctaaagggcgaacgatggcgggaccccggtgcgggcaagaggcggtgaccccggggccccgaggcgagcaa

SEQ ID NO: 7780 - DNA, 87 bp, Zea mays
actcggacacgctgatcaggctgcgttggtaatcagctgagttatggcattagctgaatattggctgcgccctgacaacacgacaca

SEQ ID NO: 7781 - DNA, 139 bp, Zea mays
aaatctctcagggctgatttagtgaccggtgatcccgaggggaagaaatcctcttgctattcaaaattgaattgcaaggggattcctccccatggatccccttggaatccctaatcaccaaatcagtcctcatgtgcct

SEQ ID NO: 7782 - DNA, 126 bp, Zea mays
ggcatgtttggtttgatgactaagttgtcacactttgtctaacttttctgtctaaggttagttcttcaattcggacgactaaccttagtcaaagtgtgacacagttagccacgaatcaaacatgcc

SEQ ID NO: 7783 - DNA, 257 bp, Zea mays
gccagggggaggaggtgcgctgcgcaggggctagggctgcacgccgggacggctgggaccaaggcgcgaccataccctgagaaacgaaggaaaacagagaacaaaaatggagacgctcaccggggaagaagaccctcgtcggagtcgaggagaaatatatcgattgacggagattcgggggtccaatcgatgaacaggacccatcgaggcgaagcccttgatgagacgaacgcagcggtaccctcgaattccgttga

SEQ ID NO: 7784 - DNA, 80 bp, Zea mays
gagatcttttgaagttggctcgtccacgtcggggacggctgacggaactgtacgtggggacccatactttatttcttgcg

SEQ ID NO: 7785 - DNA, 202 bp, Zea mays
ctgtgtcagactttggcctatatgtgtttctagttgattgcttcctagccgatgtgtgatctcacaaagacaccacgtttctgtgtcaggagactctgcttttaacgcatcacttatttgcataatgaaattgtattgtgtgatgaataggcttgtaggttcggagtagtataggtgtacatttgggtcgggcctgacgggt

SEQ ID NO: 7786 - DNA, 99 bp, Zea mays
aggcccaccaccgcgacctggttggcgatcttgtgctgctctagccggtgcccgacgcatccatgcggatcgccctgccaaggttagcgaagaacggag

SEQ ID NO: 7787 - DNA, 69 bp, Zea mays
accggtggtggcgtgttgtggcccatgaccccggatgtcggtgttttgggtccgaccgcacacccgggg

SEQ ID NO: 7788 - DNA, 116 bp, Zea mays
gctagttttagagccacaaaaccggaggaaattggaggggctaaaatcccctttttatttaagaaaaaggattttagcccttacaatcccctccggtttttggctctcaaactagt

SEQ ID NO: 7789 - DNA, 122 bp, Zea mays
gggactagtttgagagccaaaaaccggaggggattgtaagggctaaaatcctttttcttaaataaaaaggggattttagcccctccaatttcctccggttttgtggctctaaaactagctct

SEQ ID NO: 7790 - DNA, 112 bp, Zea mays
tagttttagagccacaaaaccggaggaaattggaggggctaaaatcccctttttatttaagaaaaaggattttagcccttacaatcccctccggtttttggctctcaaacta

SEQ ID NO: 7791 - DNA, 138 bp, Zea mays
catattgggccggcccgttgggcggcacgaggcccggcacggattggcacggcccaaacccggcccggcacgacaatatccgtgcccgtgccagcccggcacgacccccgtgccgtgcttgggccgataggtcggccc

SEQ ID NO: 7792 - DNA, 74 bp, Zea mays
aaaccacctagggcatgttcggttacactaatccagagggggattggtgtaaccgaacaagcccctatgcggtc

SEQ ID NO: 7793 - DNA, 157 bp, Zea mays
caaggaaagactagggcatgtttggttccctgcctaacttgccacactttgcctaacttttctgtctaaggttagttcttcaatttgaacgattaaccttagccaaagtgtggcgtagttagtcacgaaccaaacaggccctaggtacgtctgaata

SEQ ID NO: 7794 - DNA, 110 bp, Zea mays
ttataaaaacttgacttgcggggctaagacaacctccgagcattgtgtgatagagaagacctctcatacatgccaaaataaccttgtccgcgtgagcgaccgcgacctcg

SEQ ID NO: 7795 - DNA, 169 bp, Zea mays
ttagtgtttagttcgctactgtgtatttgtatatcttgtgctacttttgtgcatttttcattatatttatacatatgcatcttgtatcttatttaggaccgagagatgatgatcgtgcacgtgatgtggtgccaaccacaagatgcagttggtggacaacccaaggaag

SEQ ID NO: 7796 - DNA, 72 bp, Zea mays
aaggccactacactcggcaaagaacctataccggtgcccaggtcttggttctttgccgagtgctatggtcct

SEQ ID NO: 7797 - DNA, 203 bp, Zea mays
tgcaacttgggtcgtgccatgccggcccagcacgagcccgctgtgcttcgggcctcagttagtcaggtctggctagcacgaaatagaatcgggtcgtgccttaccgggcctggtgagtagaagtaaggcccagcacgaccctaaagcacgacgggcttccatcgggccttgctggcccaggcacggcacgcaataagtgaaca

SEQ ID NO: 7798 - DNA, 196 bp, Zea mays
cacttattgcgtgccgtgcctgggccagcaaggcccgatggaagcccgtcgtgctttagggtcgtgctgggccttacttctactcaccaggcccggtaaggcacgacccgattctatttcgtgctagccagacctgactaactgaggcccgaagcacagcgggctcgtgctgggccggcatggcacgacccaagtt

SEQ ID NO: 7799 - DNA, 97 bp, Zea mays
cctctaaaccagcactcggcaaagaaagtacctttacctagtgcctagcctagctctcgacaaatgtactgcactttgtctagtgttgacactcggc

SEQ ID NO: 7800 - DNA, 255 bp, Zea mays
ctatcgtgatggcgtcgtcgtcggatgctgggctacgtataacacgggagtcgccgatgttggcgacgaccatgaggtccccctgcttgacgatggacaacgtggttctctcgctctggaccacgtccaagtggcggctgcgtcggagcttgtcgtacacagcggcgcatgccgccacgtaggactgcttttagaggtcaaactgacagtcatcaagcttcttctcatcatcgatgagcgacgccaacgcgattg

SEQ ID NO: 7801 - DNA, 137 bp, Zea mays
catgaagtatagagtgactccacaaaccaaacacaccattagtgaaacatgacactttttagacctacaatttcatatattttaggtaagaggtaatatagggggtgtttggtttgagtgatcactccatccaaaat

SEQ ID NO: 7802 - DNA, 84 bp, Zea mays
gtgttacttgtcgtgctcgggctgggctgggctccttcatgggtcgtgctttccgggccagcccggcacggatgagcttgttta

SEQ ID NO: 7803 - DNA, 242 bp, Zea mays
caacactcggcaaagcctcggatttcggtagtggctactccgtttaaggattggctacctgttgttcctcgggagcgaattgatgaagagatagtttcatcagtggttattagggatcttctttcgatgtctatggctgtgtcaaagaaccagaggcgacccaacaaaatagaatcgagagcatacttgtaattacgatcccgaggaaatacttgtatgaagctatgatgggatttaaatga

SEQ ID NO: 7804 - DNA, 98 bp, Zea mays
gagtgccagccgttggctctcggcaaagaggttctgtaccgagtgccacatagtaggcactcggcaaagcatactttgccgagtgtcatctctggaca

SEQ ID NO: 7805 - DNA, 71 bp, Zea mays
tttgctcggcgccatagactatggcgctgaggtaacacatctcggcatcataagctatggcgccgaggtac

SEQ ID NO: 7806 - DNA, 119 bp, Zea mays
cttaaagcaccagtttcaacggtcgtctcgcgtcattttttacatataacccctcacagtttgtcagcgtttcggacttgcgaggaccgtcaaccgaccagtgaatttgttgctgcgtg

SEQ ID NO: 7807 - DNA, 92 bp, Zea mays
ctcgggccgacgggagttatgggtccgccacgtcagcccatgcaggcctagggaccaggacgggggagcgacaactgccgtcggcttggcta

SEQ ID NO: 7808 - DNA, 221 bp, Zea mays
gtctccgcctgagcggggagcgtagggcaaagcctggacacgtgccagcgccggaccctcactcatgttggggtcctttccgtcccgggaccttgctgtgggccctgaccttactcgaagaggcctagggctcgtcggtatgccttcttgggagttccggaccacatccgagggttcgggctgtgcgtacaggggtccggtgttcctctgtggaggttcgg

SEQ ID NO: 7809 - DNA, 185 bp, Zea mays
actagttaggtgcccgtgcgttgcaacaacacacgaccaatacgacaaaatgttaggacacaacgattacataaaaatgaatacaaatattatggtcgataatatatgtgttcatttttatgtaatcgttgtacactaacattttatagaataatttgtcgttgcaacgcacgggaactatacta

SEQ ID NO: 7810 - DNA, 94 bp, Zea mays
gagcgctcgtacggctgtctgcgctatgcggttcggacgcgctttacagtatctgtgggacccgcggcatgacacacgcagccgagcaagtgtt

SEQ ID NO: 7811 - DNA, 126 bp, Zea mays
ggctggttaggagccacaaaaccggagcagatagaagaggctaaaatcccttttttattcaattttaataaggagtggaatttagcctctacaataccctctggtttttggacttccaaactagcc

SEQ ID NO: 7812 - DNA, 86 bp, Zea mays
aaaaaccatagcaaagtacgggcaactaactagtttagatttatgagtttactaggtaggtgcccgtgcgttgccacggtttctat

SEQ ID NO: 7813 - DNA, 134 bp, Zea mays
atgctaggggagtgtgacactcggcaaagaaagcacgacgaacgtaaagtgcggcgcacacgtcttctttttccgagtactttttatcaggcactcgacaaagactttgccgagtgttaacagttacttggcaa

SEQ ID NO: 7814 - DNA, 162 bp, Zea mays
tgttcactctgtagcaacgcacgggcattcacctagtgtacatatatatttgctagtaaaatatattaaccaaaacacatagtatacaatgtacaaaagggagaatttgatgagcatgtctttttctacccatatcaatgatcctgccttgtgaatgaggaa

SEQ ID NO: 7815 - DNA, 123 bp, Zea mays
cagcaaagaggtgctttgccgagtgtcagggccatagcactcggtagagaaggaacacctgggcaccggtaaagcttctttgctgagtgttgtggccctggcacttggcaaagaagcaagctt

SEQ ID NO: 7816 - DNA, 78 bp, Zea mays
tagggctagggttttcttagtgggctgggccgggctggaatgggctggcccaagacactaaatcgggccgcgctaatt

SEQ ID NO: 7817 - DNA, 95 bp, Zea mays
tttgtatgccgtcgcaacgcacgggcacctacctagtacccttgatgcttaattgattactaggtgggtgtccgtgcattgtaacgggaacatat

SEQ ID NO: 7818 - DNA, 221 bp, Zea mays
ggcggctaccgtgccacggacggtccagatcgattaacggcagaacgacagaacgagggaggcagactagctttgctgtcttaataagtagtaagattcctatgacgtgtggacgccttcttttctctcttctcacattttctcgcgcacgttcacagcttgtaggagttccagtgtcgctgctcgtcttccatccgcaccgcccgcggcaaccgcacgac

SEQ ID NO: 7819 - DNA, 123 bp, Zea mays
cgctaaacacgactgagtgcagggcgaccttgtattggtcccctttccgccttctatatggatcggagaccagatgaccgcaagaaataaagcatgggtccccgcgaacagtttcgtcagctg

SEQ ID NO: 7820 - DNA, 78 bp, Zea mays
gaggcccgatgctgccacgtggactatcgcccgtgacgtaagccagcgggcggagtctgacgtaaggcctctgggccg

SEQ ID NO: 7821 - DNA, 102 bp, Zea mays
ctattgttgacgtggcgtcgacgtggcctcgtagctaggatcgcatacaggacatatgtaggtacgcgaaatctggccattttggcagcccgatgtgtgcag

SEQ ID NO: 7822 - DNA, 73 bp, Zea mays
tggaggagatggttgctgggataacttggtcgtgcaccttgccaccgggttggactgtcgagtgggaccctgc

SEQ ID NO: 7823 - DNA, 132 bp, Zea mays
aagatatatagggggtgtttggtttctaaactaaaaccttatttagtttccatatttaaaatttaggaattaaaatagaataaaatgaagggactaaaaattgtctagaaaccaaacaccctataatatagt

SEQ ID NO: 7824 - DNA, 82 bp, Zea mays
tttgatcgcttgcgtgaccggccgagcgcggactcgccgcagcagcgcgcgccccgcgcgtggtcgccccgccccgcgcgtc

SEQ ID NO: 7825 - DNA, 109 bp, Zea mays
ttctggggtttaggcgaagtcgtgcgtgcatgaggggcccgtttctgcgaggttggccagatggtcctctttgtttttgctggtgacgcacgatgtcgtccccttacgt

SEQ ID NO: 7826 - DNA, 156 bp, Zea mays
accactgtcagtagcggttgcgtgcgcaggcccaaaaccttgaacctgggcagcaaccgaggttcagtaacacgcagacaaaacttacacactcccccgcacctatttagctacttagccacctgcgagggcccggccgcggccgtggggtcttcg

SEQ ID NO: 7827 - DNA, 228 bp, Zea mays
ggcacttgcacatgggtaagccgatcctaggggatgggggaaacccggtagatagcgggatcacgcgcgtcacccgaaagggaatcgggttaagatttcccgagccgggacgtggcggcagacggcgacgttaggaagtccggagacgccggcgggggcctcgggaagagttatcttttctgcttaacggcccgccaaccctggaatcggttcagccggaggtagggt

SEQ ID NO: 7828 - DNA, 132 bp, Zea mays
cccccacttcttctcatttctccccgagatccctcccccctttgagacagtaaccgcggcagtaaacagggcggcgcggcttaccagcggcgagggaggtccggcgaagggtggggttagctctgggaagtc

SEQ ID NO: 7829 - DNA, 75 bp, Zea mays
ggtgagtgacgcacccaacaacctgcttcagtcgacacgtcagattgaaccaggttgcaggggtggtcggcctga

SEQ ID NO: 7830 - DNA, 111 bp, Zea mays
cgaaacgggcctggttgtgggttgggccaggcaaccaaacacatccatagtggtccatgtggaccatagaccattctacgtttggctaagtccatactccatatccgtatc

SEQ ID NO: 7831 - DNA, 247 bp, Zea mays
atggggactctagagtcgacctgcaggcatgcaagcttgtccgccttgggcccatcgtgaatcctattgtaacaccctaaaaaataaaccattttacatacaacaggaatatggtgtgtctctatggatgatcggaggccgtagatgtatagatctcatcaagatgattccgatcaatcactagtttgccttgtttgaagtccagatgagtcttttcgagtgtcggttgatctgagccattggatat

SEQ ID NO: 7832 - DNA, 105 bp, Zea mays
tgccccagagtgtgcagctctctggacacgtggcggtaccggacctgcccaggtggtgaggtcggtgctgttgctggcccagagtagtcgcccgatgcttgggcg

SEQ ID NO: 7833 - DNA, 148 bp, Zea mays
tcgggccggcccaagtatggtccagtcactcgtgtcgggccggccggcatgatgggctgaaaatcaaagcccagcctagccctatactcatgccgtactggcacggcacaatatatttcgtgtcggaccgtgctttgagccagttttc

SEQ ID NO: 7834 - DNA, 83 bp, Zea mays
cgaggatgactgcttcatattctgctatatcatttgtgcatctgtcagattccagagcgaagctgaggcgagccgcatatctg

SEQ ID NO: 7835 - DNA, 70 bp, Zea mays
gatcactgaaggctggctctagagatgcgaccaatctgctcgtatctggtgagcctggctcatggtgctt

SEQ ID NO: 7836 - DNA, 131 bp, Zea mays
ctgcgcaccggtttgtcagcgaagtcctgcgcagattcagtgttcaaatacatcagcttacgccgaacgccatagtggcgctggcgaagtatgtctgggcgacgacttcgtacggcgggcagccgtcggtg

SEQ ID NO: 7837 - DNA, 143 bp, Zea mays
ggaggcggtggtctcctcgggtgtgcgagcagcagcgatctcgggggccagcggcgttggtgccctgatgaggagggcaactgacgacaacgctcccctagaatcgagcgacggtgacgctcccgaagcggaccagcggcggc

SEQ ID NO: 7838 - DNA, 143 bp, Zea mays
aagccactttaagggctgatttggtgactggggatccctaggggaagaaatcctcttgctattcaaaattgaattgcaaggggattcctcccccatggatcccctagggatccctaatcaccaaatcagtcctaaaagggaga

SEQ ID NO: 7839 - DNA, 149 bp, Zea mays
tagcttcggctctgcgccatccttcctattctttgtgcgtcctcacgctgttgttggaacttgctctctgtcgcaaggggatccaacgggaggtgtggtgacgtaaacagggttctcgcacaagatggcaatagctctgttaatctagc

SEQ ID NO: 7840 - DNA, 166 bp, Zea mays
gccgtgttaggctggccgtgggcttgacttgagacctagacacggtccgtatatagggctgtgtcgacccataactacaattaaattgaaccatatcaaatttagactgtgtctaaaattatgcgctttggaccggagtgtgagccacaccacagtacataacatg

SEQ ID NO: 7841 - DNA, 159 bp, Zea mays
tgctatggtcctggcactcgacaaagaagctctatttgttgagtgtcagctagagcactcgactgcgggcgaggcacagaagatacctttaccgggtgccagacaggcagtcacttgacaaagggaccttctttgccgagtgccagcttacgacaatag

SEQ ID NO: 7842 - DNA, 158 bp, Zea mays
cataccaacaaggtgcattttttctttcgcaagcctatctcgaaagaacatccaagttaagcatctttggcttagagcaatttgggatgggtgaccgaccgggaagttttcttgagtgagcatgagtgaggacaaagtgcgcactaaagactcgtatt

SEQ ID NO: 7843 - DNA, 205 bp, Zea mays
gcttgaccgagttgcgccgcccgcccgtcacgacagcgaccacactggcgccagccgaaacgacccttccagtgtccactacttgacccgaaacggtcctatccctaggagtgacataggcaaacacatatgatattttcttacctcagattatggcgtctggagtcctacccatggtacggcgtggcacaacgaccctccctca

SEQ ID NO: 7844 - DNA, 244 bp, Zea mays
acggtgaagggcgcactggcgggtaggtgggcacgtgaggttgggtgcatgctggtttaaggggcggggtggcaagcgaggcttgtccacgtgaagcttcaccctaggtgacaaatagcgcaaccctacacacgtgcgcgcgtgtatatatatatatatatagtatatgtatttagagccctaggctctatttaactataggaagccccgaccacgtaccgaccaggtgcgcgaccgcaccgga

SEQ ID NO: 7845 - DNA, 120 bp, Zea mays
ccaggtttccttctttgccgagtgccatggtcagcactcggcaaagatggctttaccggttcccaggtttccttctttgccgagtcccatggtcatagcactcggcaaagcgaccctttg

SEQ ID NO: 7846 - DNA, 104 bp, Zea mays
ggctcatgactcttatgtctaagtatccatgtctctcgggacattcatggtctcttataaatctggagatgtctaggctctagggttcttgagacctatgggtc

SEQ ID NO: 7847 - DNA, 84 bp, Zea mays
aaccacgcctcgctgggttgctcgacgggtaggttggtcggcgggcttgccctgcctcgctgggttgctcggtggatatgttgg

SEQ ID NO: 7848 - DNA, 68 bp, Zea mays
agagaggataatcgagccagtgatgttgtgccaaccacaagatgcagttggtggatgacctgaagaat

SEQ ID NO: 7849 - DNA, 106 bp, Zea mays
ccctccatatccaacggtgctgcgtcaggggggtttttgtaatatgcacaaagtttctaagaacagttggggccccccgtgtcctgacatcgttcgccatggaggg

SEQ ID NO: 7850 - DNA, 197 bp, Zea mays
gaaaagtcagatcctgcatttggttagagggtatgaccatcagtttggcatgtagattgttaatatgtagtataattaattaatcaacaaaattaatccaaatacaacagctttcatagctcaattggttagagcacccgtttagtaagcgggaggtcttgagttcgactctcaacgaaagcagtttttaggcgcaa

SEQ ID NO: 7851 - DNA, 133 bp, Zea mays
actcggcaaagatgctctttgccgagtgtcaaggccataacactcggcaaagaaccaagacctgggcaccggcataggttctttgccgagtgtaatgtctctgacactcggcaaagaagcacgcttgtcgagt

SEQ ID NO: 7852 - DNA, 107 bp, Zea mays
cccgctggtggcccctttgccgagtgtaggctggtggacactcggcaaagaggtaaactctttgccgagtgtattaggtgacactcggcaaaggcgccgtctccgtt

SEQ ID NO: 7853 - DNA, 71 bp, Zea mays
aagacctcctgcttgcagcgattgagcctagcgctggcggcctccctcagtcgctcgagtcacgagaacat

SEQ ID NO: 7854 - DNA, 76 bp, Zea mays
gcgggtggcgcacccgacagcctggttgagtcggcgcactggattgaaccaggttgcagggatggttgatctggtc

SEQ ID NO: 7855 - DNA, 124 bp, Zea mays
gactcgcccctggcggcggtcttggtcaatgcgtcggcctcctcattcttggcctatccacatgctgcaaggtgaatcccttgaattgcctctcgagacttcggatggccgcgaggtattgcat

SEQ ID NO: 7856 - DNA, 97 bp, Zea mays
tgccgagtgccggcggctttgccgagtgctttttatcgggcactcggcaaaatagactttgccgagtaccgcactcggcaacgttctgcactcggta

SEQ ID NO: 7857 - DNA, 111 bp, Zea mays
tgtttttttgggcactcggcaaagaagctctttgtcgagtgccaagcaaaaaaccctcgataaaagaaaacactcgacaaagaagctctttgccgagtgtcaaaaataaaa

SEQ ID NO: 7858 - DNA, 83 bp, Zea mays
cggcaaccccgcctcgctgggttgctcaacgggcagggtcggtagtcttgcctcgctgggttgctcagcgggcaggttgctag

SEQ ID NO: 7859 - DNA, 239 bp, Zea mays
gtccaaaaattttttgtaccttcttggctcgagcctatttggtccgatgcacgatggactcggttatttcttaaaattgggaagaatataatggatatggtgagattacattttcaggcaaactatatatatatagtatttagagccctgagctctctctaactattggaagacccgacccgcaaaccactcggtgcgcggaccgcaccgtaccgaccaggtgcgcagactttttggct

SEQ ID NO: 7860 - DNA, 128 bp, Zea mays
acaggtggtgatgccgagtgctctcagcttgcgaaggcccaggatggcggcttcttactctgctatgttgttggtgcacctatcggactctagagtgaagctgaggcgtgctgcgtatcggtgcttga

SEQ ID NO: 7861 - DNA, 95 bp, Zea mays
gttctcgcctgagcggggagcgtagggcaaggcctggacacgtgtcggcactggacccttgcctgtgccgtatttctctctgtcctgggacccta

SEQ ID NO: 7862 - DNA, 92 bp, Zea mays
aaacttttgcagagtctaacagaatagatgactagcttctacatctaagctattaaaacttcacccgttttgctgcgctctccgcattcggt

SEQ ID NO: 7863 - DNA, 107 bp, Zea mays
gtaacggagacggcggctttgccgagtgtccctggtacactcggcagagaagctgtctttgtcgagtgtcttccaggcagcactaggcaaagcctcggattccggta

SEQ ID NO: 7864 - DNA, 78 bp, Zea mays
cgagtgtgacactcggcaaagaagtctcgggtaaagactgcatcggcaaaaagcttctttgccgagtgctttatctcg

SEQ ID NO: 7865 - DNA, 127 bp, Zea mays
gctcgttaccgagagccgagctttgccgagtgcggctctcggcaaagccgtctttgccgagtgcccgagaaaaggcactcggcaaagcggccggcactcggcaaaggctcggattccggtagtggtc

SEQ ID NO: 7866 - DNA, 105 bp, Zea mays
gagctggctcgagctcgtgtcgagctggctcgttaccgacccgagctgagatgttagctcagctcggagtaaaagaggcgagccgagccgagctgacctcgagtc

SEQ ID NO: 7867 - DNA, 106 bp, Zea mays
aggaatattcggaccaaggtccgatctaccacaccacgtgagcacgccgccgccgcccgggtgaggtcgtggctcgtgatagatcggaccttgatcaattattaca

SEQ ID NO: 7868 - DNA, 202 bp, Zea mays
gcgatttagctccggtgaagtggtcgacgacgttggggaggtcacagcggtcacgtcggtgtgcgggtcggtgtcggagatggccgaagttggtcagtcctcgcgcgtaggagggggagctcgtcgacggcgagtgattcggcctaaccacgacggtatatctcaggccaatgagttggggagcttcacggaaagtcaggga

SEQ ID NO: 7869 - DNA, 162 bp, Zea mays
gggttgtctcggggacgggtttggggagctaaaacccgacggggaattccccgttgccatccctaggggtgctcgtagtaggggttacaagcgtagcacgcgcgcgcgcgagagggagagagagagagaaagggttccgccttgagttgtctgagttagcct

SEQ ID NO: 7870 - DNA, 74 bp, Zea mays
gtttatgagcgtttgttatgtggatttatgcactaagatgtgtgtcaaaacaggtggtggacttccagatcgta

SEQ ID NO: 7871 - DNA, 68 bp, Zea mays
agagagctgccaggagtaagtaccgcctgtccagggattggacggggtgttacacttggcgactttca

SEQ ID NO: 7872 - DNA, 95 bp, Zea mays
agaggctggccaacggtggcttccctaggaaggagcagtaaggcaagggtaaaaccaacgtcttatcccgggtggagccacacgtactcgtgggg

SEQ ID NO: 7873 - DNA, 228 bp, Zea mays
tcctggcttggggttgaccgacgaggacgtcagtgttctaagggggtggattgtgatatcctagaccagtggattgcgcgatatcctgcctaatgcttaataagattgatagaatactcataccaacaaggtgagttgtgcccagagcaactccaccatgagggcaatgaggtgggtatgaggaaccatagcagagactgaagcctcatcgttgactcagaaaaccaa

SEQ ID NO: 7874 - DNA, 104 bp, Zea mays
ggcctcatgtcgcgtctgctcgcttgtcctgcgtatagctagctggccctggccatgtccatgtacacagacagacgacgacgacgacgcgtcgtacgtgcagc

SEQ ID NO: 7875 - DNA, 247 bp, Zea mays
caaatgagccgcctctaggaagttagctgcccacgctagcttcctacgacctcctctaggaagttagctttcagttgctgatccgtgggtgcagtcaaacgaaccgctaacttcctacgacctactctaggaagtaagattctcctgctaacttcctacagcgtcctctatttatgttagctttcagttgctgattcgcgggtgcggtcaaacgagccgctaacttcctacggccgcctctaggaag

SEQ ID NO: 7876 - DNA, 114 bp, Zea mays
caacgccggcgactctcgggttgttctgggcaccgcatccgacgacggcgccgtcacgccatctagctcatcatccacctgaagctcaaccggccacgtaagtcgctactgacc

SEQ ID NO: 7877 - DNA, 195 bp, Zea mays
atgcatcaaactctaaggatgcgtttgtgtttggtggcgggacagcaggataagaagtcccctggcgtcctctctcttgtttaaggaatcatctcttaatccctgactctaaaacaaacaaccttatttaaggaatcgtcctatcctatctcgttatgtcattacaaccaaacgcaccctaagagaacatgcaca

SEQ ID NO: 7878 - DNA, 111 bp, Zea mays
cgcgttgtgcaggcaggcaggcaggcatgtcatcagcgcctggcttggcttctccactccacccagccagcgtcatctgataaggcttggccggctggcctcgctcgaggc

SEQ ID NO: 7879 - DNA, 214 bp, Zea mays
aaggacctgtccaagaggaggaccaggatcaggcttcagaggctgctattgaggatctccccgcagcctcagcaatagaaggcaagccccggtatgcacaccacgcatatatgctactactacacaatgcggaggactagtaatgcgcacttagtgtagagttgcttgaaacctctagttgcatgaacttaggactcctttttgagtttgtata

SEQ ID NO: 7880 - DNA, 99 bp, Zea mays
atattcttattggactttgtgtgcggtgtggcccctgggagatgggggcccaggtcggccgcccctcccgccctacctcaggcacggccctgagtccta

SEQ ID NO: 7881 - DNA, 146 bp, Zea mays
atagattaagggcctgtttggtttgtggctaaatgtgccacactttgcctaaggttagtcgttcgaattgaataactaaccttaggcagaaaagttaggcaaagtgtggcaactgaggtagtgaaccaaacgggccctaagatcat

SEQ ID NO: 7882 - DNA, 112 bp, Zea mays
tgattactaggtgagtgcccatgcgttgcaacatggacatataatatcatggtaacttatgtattataatatatgtctccgttgcaacgcacgggcactcatctagtatatt

SEQ ID NO: 7883 - DNA, 242 bp, Zea mays
gggtaaggagtatctctttgtaactggttacaccgatgctagcttcaaactgacctagacgagttaaaatcgcaatcaggttttgtgttcacaataaatggtggtgctgttagttggaaaagttccaagcaggagactgtgactgttggactgtgaacccctaaccctaacagggttgggtgatatattaataggctgagtaaactgggccaggcccattacagaggggtgagatggacatt

SEQ ID NO: 7884 - DNA, 102 bp, Zea mays
cgtgggaccagtggggccaacagggcgaatcggctgacaacccgatggatgatatctcgagagaaaaatacagcgacacgcacacgttgctcaagaaaaagc

SEQ ID NO: 7885 - DNA, 72 bp, Zea mays
taccggcaaagagcgcgcctttgccaagtgcctgttggactggcactcggcaaagaaggctcaagtgggtcc

SEQ ID NO: 7886 - DNA, 124 bp, Zea mays
caaatatgccctctttgccgagtgtctgctggactagctcttggcaatgggagcaccagtgagcccctttgtcagtctctttgtcgagtgcaataggagacacttggcaaacagtgcttcttta

SEQ ID NO: 7887 - DNA, 229 bp, Zea mays
cctctccctcgctctgcgcgcaagaccagagaactccgccaccacccgccgtcgactgtcgtccgttctgcgaccgtcgtcgagcccacaccctgtctgttgcctcagtgagttccaccttgccgtcagctactcgggacaccctctggtttgctcttcctctctttggtttgcccggtccgcgctcatcggagcgtttcttgcgcagccggagctccgccgccgtcga

SEQ ID NO: 7888 - DNA, 70 bp, Zea mays
aagacctcctgcttgcagcgattgagcctggcgctgccagcctccctcactcgctcaagtcacaagaaca

SEQ ID NO: 7889 - DNA, 199 bp, Zea mays
ataggactaagggggtgtttggtttctaggaactaatgtttagtcccttcattttgttccattttagtatataaattgacaaatatagaaactaaaatagagttttagtttctatatttgataattttgtaactaaagtggaataaaatgtagggactaaaaattagtccctagaaaccaaacacccccttagtcctat

SEQ ID NO: 7890 - DNA, 79 bp, Zea mays
gtcggtagctaagacgctttgccgagagccaattttttccaagtactgggcactcggcaaagaagtttttgctgagaac

SEQ ID NO: 7891 - DNA, 165 bp, Zea mays
cctgagtgaaccccttcggactttatccctcatgcaacctgagacagggtctcccatgctagctatggtgggtacaagtgcggccactgcacgacggcagtcggggtcattggagcattgtatgccaaggcggtgaggcctggacgcgaacggggaatcgatggg

SEQ ID NO: 7892 - DNA, 92 bp, Zea mays
ttacaatcacaggcggttttgtcttagggttcgcttgtgaaaatgatagagcaccacaggcggtcctaaacaaaaaccgcttgtgatactat

SEQ ID NO: 7893 - DNA, 150 bp, Zea mays
tattaaaatattctttgccgagtgccagatcagcggctctcggcaaagagttctttgccgagtgtcccccgttccggcactcggcaaaggttctttacttcctctttgccgagtgtcacacatctagcactcggcaaagaagtctttgcc

SEQ ID NO: 7894 - DNA, 84 bp, Zea mays
cgagtctagggctggaaggcactcgcattctctcgctcttttcagacttacgcctggtgcgggtgcctctcagtttggagctgc

SEQ ID NO: 7895 - DNA, 70 bp, Zea mays
acatcattggatcattggcgggtggctgagtctgacaagagactgactttccttggtggtctgtgagaag

SEQ ID NO: 7896 - DNA, 118 bp, Zea mays
aggcacgggacatgaaagggccgcgtcaggctctgacactatactaaccggaccggatcgtgcctggactgtgctttttcgtgtctttgcctgggccggcccatcgtgttagtgccaa

SEQ ID NO: 7897 - DNA, 68 bp, Zea mays
ccaccggggacactcggcaaagaacctgacatggggaccctctctggcggggtatttgccgagtgtcc

SEQ ID NO: 7898 - DNA, 210 bp, Zea mays
aggccctgtttggcacagcttattttcagcttcttcacaatttaagctgaagtcctgccaaacaggcagcttctgcagcagcttatcagttcagttgcttctcaaaatgaacaaaaagcagccaacaagcagaagctgctttttaccagcttatcagataagttgctttttcaacaaacagcagctgtcccaaacagggcctaaaaagac

SEQ ID NO: 7899 - DNA, 74 bp, Zea mays
ggcagatcgcgggcactcggcaaagatttttttaatgtaaaaatagtcgttgccgagtgtagagcggagggact

SEQ ID NO: 7900 - DNA, 165 bp, Zea mays
tgtctaacgtcgagcactcggcaaagatcgtaaatatatactttgccgagtgcctgctctcctcatgccctcgacacagcgttgtttgccgagtccctccgctctacactcggcaacgactatttttacattaaaaaaatctttgccgagtgcccgcgatctgcc

SEQ ID NO: 7901 - DNA, 190 bp, Zea mays
cacacaacgtttccgtcgtcaaggcccagactcggttcctctcaaaatgaaatatataaatctatatctatactactactaatagggtgcccgtgcgttgcaacggaaccgaattataacacgataacttacatgtctctgttgtatgttatagatatgtgtccgtgcgttgcgacggaagtaaaagatt

SEQ ID NO: 7902 - DNA, 184 bp, Zea mays
tcggcaaagtaagttttttgccgagtgcctacctctggaactcggcaaagttaatttgtaaataaaaaaagaactttgtcgagtgccccagatctggggcactcggcaaagtatatttttaaattaaaaaaatctttgccgagtgccagatcacgggcactcggcaaagagcttgaccttaatc

SEQ ID NO: 7903 - DNA, 144 bp, Zea mays
catactaagggcatgtttggtttgatgcctaacttgtcacactttgcctaacttttatgcctaaggttagttcttcaattcgaacgactaaccttaggcaaagtgtggcacatttagccacgaaccaaacaactcctaatagtt

SEQ ID NO: 7904 - DNA, 76 bp, Zea mays
gtcagataactatcttcatcgagtatttttaggctttgtcgagtgcttcagacactcggtaaagaagttgtgtctg

SEQ ID NO: 7905 - DNA, 210 bp, Zea mays
acccacaaatcatagacacagacggtcccaccagtcatagcaaatttctcttcatgaggtgcatgttgtactgtatccatgcgttctgtatgtgtgttctgcggtgtaggcgtgtagcttatttgttgtcatgagaataaagttccttctatcaatttgatagatgccagttgcatccaggttggctcgtctgtgcggtgctaagaagat

SEQ ID NO: 7906 - DNA, 249 bp, Zea mays
gtaagtcgctactgaccgaccatgaattcttggcgcaggaacgatgaccattgtgtgtgcgtgagtgttttcgaacaagatgtatgcccaggagtagcacatccggtggtgcaacgaccaggtgtactacctcgctgatgagctcggggtgcattttttttggcagcccagccaagagtggtcggtactcaccatatcgctgcgttcgacgactatttatatcaaggattgtggcgtcatctcgacacc

SEQ ID NO: 7907 - DNA, 78 bp, Zea mays
aacccccgatctggctgtgactgcgcgctcctattgttcaggctgacgtggtgctgcgcgggctcagcggctacaaca

SEQ ID NO: 7908 - DNA, 138 bp, Zea mays
aaagaagcttctttgccgagtgccaaaactcagctcttggcaaaggtaacagccgtcagttttagacagtggctgacggccctttgccgagcatcaccgttcgctgagtgtttggctctcgacaaagatgtctttgcc

SEQ ID NO: 7909 - DNA, 116 bp, Zea mays
tgaatcctaaccctaacaggggttgggtggtgtattaatagacttgagtactgggccaagcccagttacttaaggctattaatatagcacccaacccttgctagggttttccaata

SEQ ID NO: 7910 - DNA, 78 bp, Zea mays
tgctccggtccccaggcgaagtcttttgcaccgcggagtgttttgaggaaggggagacttcgctcggcgaacctggag

SEQ ID NO: 7911 - DNA, 118 bp, Zea mays
tcggcaaagttgtctttgccgagtgccgttctgtgccgagtgttcagcgctcggcaaagcacgttttgccgagtgcctaacgttaccgagtacggcactcggcaaagctttctttgcc

SEQ ID NO: 7912 - DNA, 155 bp, Zea mays
tggcggctggcctggtgcctggtgcgtggtgccctggtggccgcgttagggtcttagggttagcaaatagcgagagcaaattcattttatatgagacatacgtgtcatatattagcgggtaccccatcgggtagcgggtatggggcaacagagaa

SEQ ID NO: 7913 - DNA, 127 bp, Zea mays
gcaggtggttgcagaggagcagcggagaagccggccggccgtgcgagcaagccgtaggatacggctgggcgttgaacgccgccgccaccaggcgctcggcctcatccctatccgctgaaaccatcct

SEQ ID NO: 7914 - DNA, 82 bp, Zea mays
ctcatggtggtccctccggccggggtggcggccacgcgtggccgtccttctacaacccctggaccgggaccatcgccatgtg

SEQ ID NO: 7915 - DNA, 205 bp, Zea mays
  unsure (7): n = A, C, G or T
cggaggntgacggacctttgccgagagccgcccttcaccgagtgtttggcaaccggcaaagaaatctttgccgagtgtattcctgtgccgagagtcctactctcggcaaacggcgtcgttaccgagtgcccgacaaaaagcaatcggcaaagctccgagcactgggcaaagctccgagcactcggcaaagacccggattacggta

SEQ ID NO: 7916 - DNA, 119 bp, Zea mays
gatatcatgctatgggtctgtttagttcggcttttttctgaatagcttttctgaaaagctggctgtggagaaaagctattcagaaaaggccgaaccaaacaggccctaggtatgacttg

SEQ ID NO: 7917 - DNA, 74 bp, Zea mays
gaggagggaagccaacgaggccgtcgccaaggagcaggctgcgcaggcggaggccaagctggcgcgggcggagg

SEQ ID NO: 7918 - DNA, 88 bp, Zea mays
ttaatccatgtggattgagtgagattgggtgggtttaaaatcaaagcaagtcaaacttcccaacaccctccaatatcatctaatccat

SEQ ID NO: 7919 - DNA, 169 bp, Zea mays
atgcgttgaccaggctgttgcgcgtgtttgtttgcatgtatgcagatggccagacctgcatgtacaggtgcagtcacgtcttcgcgggaggtttttgtcctgcatgtgtcgatacacgtgaaacctccgtatctgtgggagcaggctcgcgtgaggccggttacacaca

SEQ ID NO: 7920 - DNA, 222 bp, Zea mays
cttggtaaagaggtctttgccgagtgccagatatttgacactcggcaagaagtctctttgccgagtgccggccctggcaagggtgacgaccgtcagctttagacgtcgctgacgtcccttgccgagcgccacctttgccgagtgttgccactcagcaatctgtcttgtcgagtgtgttctgtgccgagtgtcttgcactcggtaaacgagctcatatcgaga

SEQ ID NO: 7921 - DNA, 152 bp, Zea mays
ctcatcagcgattgtcatccgcgccatctccacacgcccagacgggtagtgaaaaaaatgcctagcctgcacacccgcatgctggccaggcctttttttttcactacccgcctgcatgtgtggagatggcgctaatgacgatcgctaaggag

SEQ ID NO: 7922 - DNA, 112 bp, Zea mays
atgagaatagccggggtgggccggtgttgaggcccgggcggggtgaaacgaatgctgttttgtcgtgggccgggattttttccagaccgggctgatccacggggaattgggc

SEQ ID NO: 7923 - DNA, 98 bp, Zea mays
gcctgcgcgcgtggaccgggcgattccggccatctccgacgtcaagccgtacctcgacgtgaccgccagagtctccccgagccaccccaccctttcgc

SEQ ID NO: 7924 - DNA, 151 bp, Zea mays
tgctggaatgtggtagctcgtttagctcacgagctgggtcgttaacgaaccgagctaggatgtcagctcagctcatgaaaaaaattcaaacgagccgatccgagccgagccgagctgaccatgaaccgagcgagccacgagcatttcgtcc

SEQ ID NO: 7925 - DNA, 92 bp, Zea mays
catattttttcttcgcgggtatgggtttgggcaagtaatacccagcgggtttttacccgttgccatctctatatctcgcgtgaagctcgcgg

SEQ ID NO: 7926 - DNA, 168 bp, Zea mays
caagttaagcgtgcttgccttggagcaatttgggatgggtgaccgaccggggagttttctcgggtgcacatcagtgatgacaaaatgcgcacaaaagacttttgttggtgtgtggggacgatatatgatcctagagagctgtcaggagtaagtaccaccggtccagag

SEQ ID NO: 7927 - DNA, 140 bp, Zea mays
cccctgtttttgcctctccctttggcggggtgcccccaatctcccctattcccagagggccggggagaggggctaggggattgggcccccaacaggtacccggttgtccgccttgcctcgggcagagccaaagatgaaag

SEQ ID NO: 7928 - DNA, 95 bp, Zea mays
gtgaggcacgccgcctgccagctgagtggacaggcaaaataaatgctgaggcggcacatcacctgtcagcagggtggacaggcggcacgtcctct

SEQ ID NO: 7929 - DNA, 74 bp, Zea mays
agtcatggaagacgacgacgacgacgcgcgctccgaatcggctcgctcgtcgtccgtcggcgtcagggccatgc

SEQ ID NO: 7930 - DNA, 128 bp, Zea mays
acgtggcacatacctcgacgccatagatcttggtgccgccggtcaacgacccttacctcggcgccaagatctatggcgccgaccttacctcggcgtcaagatctatggcgccgaggtatctgcatata

SEQ ID NO: 7931 - DNA, 86 bp, Zea mays
ggcgcgcagcgacagcggcagcacgggggagcgggaccggcggttcgaccagttcaaaaccttcggcgggcgcctggagcggcagc

SEQ ID NO: 7932 - DNA, 202 bp, Zea mays
tatgaccttcgtccgaagctcattaaatccttggggagataatgcttcagcggatgaagggcatttatgcttaacatttttgtgttgccttgttcttaattcgaagcatttgtgaacaagtccccaacaatagcttttgggaatcaaatgatatgactgtttcttctggatggttctgtagcgctggactgactcggacata

SEQ ID NO: 7933 - DNA, 91 bp, Zea mays
agctcgacgtcaagatctgtggcgccgagctagattgccacgtgccctgccacgtcggtaagctcggtgtcaagatccgtgacgtggagct

SEQ ID NO: 7934 - DNA, 193 bp, Zea mays
acgtggcaatctagctcggcgccacagatcttgacgtcgagcttaccgacatggcagcgcacgtggcaacctagctccgcgtcacagatattgacgccgagctagatcctgacgtcgagcttaccgacgtggtagcacacgtggcaacctagctccgcgtcacagatcttgacgccgagctagatcttgacac

SEQ ID NO: 7935 - DNA, 252 bp, Zea mays
acgccatactaggagtaccgaacccactttagtaagctatttctgcaaaagtatcaaagttgactcttgctaaagcctctccttgattcccaattccagcatacccttgagagtcttttctttagtcaggtaagtcttgctgagtaattccatactcagggttttattccctgttgtttttcaggttatagttttgtgctgctgttgatggtgttaagtgtcggtgggctcggccttcttatataagtatac

SEQ ID NO: 7936 - DNA, 156 bp, Zea mays
gtatttcggattcgggtttcaggttacgggtttttttgtccagccctaaatggggcaaccagtgggttgtctatgggtgcaatatgaagtgcctgtacacagtacttctgttctaactaggtcagtgcccgtgcgttgcaacagaatcatataata

SEQ ID NO: 7937 - DNA, 212 bp, Zea mays
tgggtagccaccagactccatattacacactctattcgcatgcacgtgttagactgacagttagatcccatgagcataggctttaattgcaccatttctcatacttgtgccatttctcatacttgtgtggagagaagacatgagaaagagagtggagatgccccgacgtgcattatggggagagggatgcggagtctgggagagtgtgaaca

SEQ ID NO: 7938 - DNA, 121 bp, Zea mays
acactcggtaaaggcttcctttgccgagtgtcaactggttgacactcggcaaagaatctagaacatatatttgccgagtgtctatcacttgacactcggcaaagaagtctttactggagtg

SEQ ID NO: 7939 - DNA, 148 bp, Zea mays
tgagtaccaactggcactcggcaaagtctttgtcgagtgcccgataaaaagtactcggcaaagaagctgttgccgatgtactgttcgccgagctctcttttctgagtgtcacactgggcaaagtgtttgccgagtgcctgaagcactc

SEQ ID NO: 7940 - DNA, 77 bp, Zea mays
tactggaagacgatgaagatggtggcgacgagatgcgcttgcgtttctgcgcaccttccttcgtcggcgccgtggat

SEQ ID NO: 7941 - DNA, 125 bp, Zea mays
aaaaaaaagaaggtctttgccgagtgctgaatcaggcgatattcgacaaagaatttctaaaaaaataaaaaatatctttgccgactatcgaatcaggggcactcggcaaacattttaaaaaaata

SEQ ID NO: 7942 - DNA, 101 bp, Zea mays
agtgtactaggtgacactcgacaaagagaatccatttgccaagtgtattaggtgacagcttgtgttaggcttttcctctttgtcgagtgtccgctgggccc

SEQ ID NO: 7943 - DNA, 222 bp, Zea mays
ttgccggacccttaagtgtgcgttttgttgtgggacaattaggacaggaacgacccctgacgttctctctcgtccctccaattttgagggataactggagacaacactgggatagtactgtcacaacccctgacactgaaccagacaacctcatttgagggatcgtcccgtctcatcctatcttgtcattgcaaccaaacgcaccctaaagaactcgttggt

SEQ ID NO: 7944 - DNA, 72 bp, Zea mays
accatgtctaatggaccagcacgaggcacggcttatttaataatgacgtgagtcgtgcttgagtcgtcgtct

SEQ ID NO: 7945 - DNA, 107 bp, Zea mays
gtttccgcctgagcggggagcgtagggcatggcctggacacgtgtcggcaccggacccttgcttgtgccgggatcctctccgtcctgggacccttctaaggcccgaa

SEQ ID NO: 7946 - DNA, 185 bp, Zea mays
ccgcaccatctcatcttggatcatcgcattcgttaactttatttgagattaggtttggttgcttgtatgtaatagtcacaacctacatatgtggatataaaataagtcattttgatactattaacctacatacactcatacactcaaaattatcgtatctggctggccaggatgacgccaggctg

SEQ ID NO: 7947 - DNA, 88 bp, Zea mays
aggggcctaacagcggggtgctggttggcgatgttgtgcacttgctgtgattgcggccgtctcgaccggagtctgctgcggagtcctc

SEQ ID NO: 7948 - DNA, 82 bp, Zea mays
ttcgtgtccttcggattggttcctaggctagaatgagtggaccactgttttctggtctagaactgtttccgacgtgaaatac

SEQ ID NO: 7949 - DNA, 200 bp, Zea mays
tgtgttgtgcctaataggccggcccaaatcacacaatttctggcacggcccatatctggcacagcccaatctaattgtgggcctgggccggcacgacccacattgtgggccgtgcctgggcctcaattaggttgagacgtgccagacttggaccgtgccagaaattatgtgttttgggacagcctattaggcacacacaa

SEQ ID NO: 7950 - DNA, 158 bp, Zea mays
tcccaaaacacataatttctggcacggtccaagtctggcacgtctcaacctaattgaggcccaggcacggcccacaatgtgggtcgtgccggcccaggcccacaattagattgggctgtgccagatatgggccgtgccagaaattgtgtgatttgggc

SEQ ID NO: 7951 - DNA, 76 bp, Zea mays
acggcgtgatggcgtcgtcgtcggatgcttttgtccaacaacccgagagtcgtcgacgttggcgacaacacatgag

SEQ ID NO: 7952 - DNA, 224 bp, Zea mays
aagatgcgccgaacaagctggccatcgtgaaggaggacgcacacaacgatcccgtcggaattgggcggagccagccaagaagtggcgccgacagtcatggcaatgacaggatggggagtggtggggggcacgccgagggaggtgctactgtatacagcagcagcaaggtcgggaggagcggtggtggcagtcgaggacagcgaggagagcattgaggagaggcc

SEQ ID NO: 7953 - DNA, 118 bp, Zea mays
ggtaaagaagctctttgccgagtgccacacaaaaaaccttcggtaaaagaaaacactcggtgaagaagctctttgccgagtgttttatgtttgacactcggcaaagaggttctttgcc

SEQ ID NO: 7954 - DNA, 184 bp, Zea mays
agggaggcgcgcgtacaggagggtcgatggcgtgctcttatggggaggcttgctcggggtgttattgcacctgggtttatatatatatatatatatatatatatatactacttattaaggttgtaagagtagtctgccattccgtgttctgccaccattctcattccttgttctgcgtttctca

SEQ ID NO: 7955 - DNA, 131 bp, Zea mays
cttgaacaaatcactcatgtaaggcgccttttataacgatagtattggaaaccctaaccctaacaggagttgggtgatctattaatacagtaactgggccaggcccattacagagggtgagagggtattct

SEQ ID NO: 7956 - DNA, 108 bp, Zea mays
tcggggttcaggcgaagtcgtgcgtccagcataaagagaaacgtttcggtgaggtcagccaggtggtcttccttgcttctgctggcgacgacgatgtcgtccccctat

SEQ ID NO: 7957 - DNA, 55692 bp, Zea mays
  misc_feature (7779)..(7780): n is a, c, g, or t
  misc_feature (9820)..(9820): n is a, c, g, or t
  misc_feature (15860)..(15860): n is a, c, g, or t
tagggctagtttgggagtccgcggcttgctgcggctgcaaaaggccttgttcgtttgtatgcgtgcaaggagccaagcatgtgtcaaaaacaggtggtgggacgacgacgacgatgaccctgggctcggccttcttatatcggccggccggccggccgtcagatcagaaagagaccagagggcagtctccttggctagccagaacagagcggctccgttcatcggatgcaccagatcgcttgtgccagaagcggcgatggattcaaacccatccaatcccgagccagctcgttagctcgagtccgacacggccactgacaacgactaaccttaggcaaaaaggttgacgagattggccaggagagctaaccgaacaagccggcaaagtgtggcaagttaaagggctaatttggtgattagcggcacaaacgaacaaagtccaccgactgcaacccagctctaagtgccggtgggctcggccacaaacgaacaagacctcacgccgcgccgggccgccgccgggcctgtttggtttgtggcggcaaagtgtggcaacttagcgtcgtcggcgcggacgagataggccctgtttggaagcaacactcggcaaagagccaaaactttgccgagtgccagcgaccagagctcccttcaatccaatacacttgtgacgtcaacattgcacgtgccctgcttctccaacaacatgatgtagttcaacctattccctgtcattgagtctgatttggtgaccagggatctggaccctatgctcgggacggtgcaagcatgcaatcaaaaggagcccgacgtctgcatctcgtcgtcaaccgccgccgcgattgagagctaaccgaacagggcctgtttggtttgatgggggcttcttcttgcgcaggccagtggcggacgcaggacgaggctcgggctctcagcgacgcgaccgcctcctccggcacgcggtgaggtcgttggcgctgaggcagaaccaggggaggaacacgcggcagtgcccaccccctctttgccgagtgccagcgacacaaacgaacaaggcctacttgcacgcttgcacataattgtcatggcttgtggctgaagttgcaacgcacggacatatgttcgtttccgtcggattacgttcgtttccgtcggattgggggggtgtttggtttctagtgagcagccaggctcccaaaagttggcgagcgaagcggagaaggagcagatgcagacgaggccacaaaccaaacaggcccttgctcggcggcggcgtagcggtggcaagttaggcatcaaatccagtcggttggcggcgatggtgcaagcatgcaatcaaggccgactgccgtggagagcggtagcaacgcacgggcacatcaccagcggcgacgggaacccagatcatgctggcagcttctagtccctagaaaccaaacatagctgatagttgcgtgagtactggaccgcctgtgatgtgaaagacactcggcaaagaaaaaaacactcggcaaagagctctttgccgagtgttttttcttcggttacccgtgcgttgcgttctcggccttttggctaagcggctgacaaccgacgggaatggatcagatggtttgcttgcttgcaggtagaagccatccagtgactgctgtattgctgtcactcgacagtccaacccgggggggtgtttggtttctaggagtccctagaaaccaaacacctggccgccgaaaatgactgcctccggttttgtggcttcccagacgagcagcgagcggttcgattccaggtgcaatccgattagccacgaaccaaacagccaggctgtttgcagccccaccgctggagcctggaggatcgaacccagggcttccattaccgggtcacatcaagcgtttaaggctcattccggtacaaccgcactatgtgtacaaacctaagatattggcacggctcaatcttattataaccaaacacatcgttaggcaaagtgtggcaaggtcaaacgcttgatgtgaccagatctagatcggatgcaccggtcccgatctgcaccaagcagtttctctctaaggtatgcaatgacagaacgggatgagatttttctacagtattttgtcagtggattaagatgtattgatatctctatatcgtcggatccatgctggcagcttcactcatagatcatgctggcagcttcaatattagaggcagcgcatactggcagctctgcttctgtcttaccgagtctgttagattacagttcaagaaagcctgtggttagatgaccatcagcaaactggcttaaaagtgtggcgcgagaatgttattgttaagcttggattggatcgaagggagctcatgctggcagcttcaccaaggttcacaaaatgtaacgtagtggatttgtgtggccgtcatagttaagccgtgtgataaagatcaatgcgatccctttggccggcaagtcatccttggctagagttgatgcagatctgatttagatcatgatccaaccgtctctcatatggaaccaggctatcttatgactggcaacggcatgcagcatcatcaagattcgttttttgacctatggattagctaaaacgccttaacaacccagttcaagaaagctgtggatggcatacaaggaatgagtagttggatgtggagggtgtgaacggtcctctaaatttagatacggtcctctaaatttagagtcggataaaaccacgcctacattgcacgtttgcaccaaaaagggctgcttggatggccacataccccaaattcagggtgtggtagcttcgttaagctggcgtgatggttaggtcgcagccgagttcaggaaccaagtgacctgccgccacgtcccggctcttatgcttcgttgtgtacgagagcatggcatcataagcatcaggcttcgttgtctttattacagcctatggcgccgagctaaacgcttgatgtgacccgggtgacccgggctaaactttagtggactaaagtttagcccgcacgagtcgagcgagctcacgctagatagcggaccaacagagttagccacgaaccaaacatcacaaaaatgaggatagacatcggctatccatatccgtcccgagctcggcgccatagatccatagatcttggcgccgagtcgaggacgagctgcttatctagggctagtttgggagctcgaagcactcggcaaagctagaagggtgcgtttggttgcaacgactgctgcggtgcgccaggagcttagcttggcccatgctgcgtttggttgcaatgacaagctgccgactcatccattcatcagaaagaggccagaggcgcccgtctagctcagtcggttgctgtttctctgcaggacagtgcggcggctcccagatccggcactatcaagcaggcacggggctcgagtccagccatacattgcaaccatcagtatcatctttgccgagtgttttttgtaaacgaacaaggcctaaggccacaaacgaacaagaccttattggcacggctcaatcagagttagctggaacgattccgtggaaagtcaaacgcttgatgtaaaactttgttcccaaacagaaggccttgttcgtttgggtacggcgaaccagcaagcgaaaagcggaccctaagacaaaacaaacgcttgatgtgacccgaaggccttgttcgtttgtgcataactaaccttaggcagaacggccaaccaaccaatcacgttggcacagacctcattgctccagggcgccgccgtcggcggcgtctgaacggatggcttcgtgggccgtgcttttgtgggtaggatgtgtttggttgcggccatagcactcggcaaaagaataactaaccttaggcaaaagagactttgccgagtgtgccgacacaaacgaacaaggcataaaacactcggcaaagaagcgcttctttgccgagtgttttaaaagcactcggcaaagaaggtagagatggcaatggggacgaaacgaacaaggcctaaacaggccttgttcgtttctgccgacgtgaacgagactccggaatgtccccgttgcaacgcatctgatttggtgacccgggatagcccggcagcaaaccaggagtggcaagttagacagtgaaccccccccccccccccccaatagggctagtttgggagtcacgtgcgttgctacggagtcatggtgcaagcgtgcaaccaagacacaaacgaacaaggcctaggccttgttcgtttgtgtccagactttcaacgtgtgttgcccgccttgcaccaagtgaacgatctgcaccaagcgagccggcaaagtgtggcaagttagcaagatctatggcgccgagctgaggccttgttcgtttgtgagcctttgccgagtgtcaggggcgctgatgaccgtcgctgaagggtgcgtttggttgtaaaaactttggttgagaccaattagggctagtttgggagcaaacagcctaaggttaggcatggtttggtttgtggctaattaagccaaggatgagctgcctgaggcagtctccttggctagtcttgtgacttgcgacgatgccctactttttcatctcccgcagccacgaaccaaacaagccgctgatttggtgaccagagagaagctcctttcagctgatgtaggatgtgtttggttgcctggattgaccctacctgcagggtgatgagggtacggctccaacaagtaaggccgcaacggtgagtccaaataccggagaggaggtgagtgaccgtgcgtcacacgccaaagcacaggtctatcgtctaacctcaatctcatccagactagtcggttgtccggagaagacgacggagtcgcttcgcgagctaaacgagccgagtgccacagacgcggtctagactctaaatttagaggatgagaagcctggtccgagatctttagggctagtttgggagttagagatgctagggctatccacaatttcggatacggatacgggaatggacggctgagatcgcaggccttgttcgtttgtgccacttgctagaggccaactgggctgtttggactgctgctaggtgacaagttaggcagggaaaggccttgttcgtttctgtctgcgtttggttgcaatgataacggctatcgggtcccattgaagtcaaacgcttgatgtgagctgtttttttttcttttagtcgcgttctttgccgagtgtctcagttgccacagtttgcctcactctcttctgtcagccataagcttatgtccgacggtgtaagcttatgtccgactgctgctgatttggtgaccagggaataggctatgacgccgagttaagacaaagggcctgtttggcttgcaggtagaagccatcttagggctagtttgggaggtcgtgcgagattcgctggcgtgctcagcagaggaggcagcaccacgcacgcagggtcaccggaaggccttgttcgtttgtgttaggctatctccagcaatctccagactgtttgcagcctctgtgagaggctgcaaacagtcgaggggctgcaaacagcctgaatcgtcgactagggcgactaggaccgaccaggcgcctaacactcggcaaagaacactcgatgacgaccgttgaaactggccgacgcaaacgaacaaagccccgtgcgttgcaacgggaaactgttggactgcgggtttcgagtccaaataccggaggggctgtgagtgcgacgacgacggtgagccgtcgcaacgcacacgttgcgacggctcacaacaaggcagtctccttggctagctgaggccttgttcgtttatgactccactttgccgagtgcagcttctttgccgagtgtcagtaggcgagtcgtgactgcgtctgggccagacccattacagccaaacaatgtagtggacgggttaggaacgtgggtacccatagtccctagaaaccaaataatgtgcccgtgcgttgcgacaggccttgttcgtttgtacctagggctagtttgggagcacccttttctcggcgtcatagtcactcggcaaagaaggcacatagggctagtttgggagccaagcaatccggttaggaatcggcctctgctaagccgtcagaactagcaggctgacgggctagagacactggatatagggttaaaggcactcggcaaaggctgtttggtttgtggctaactgcactcgacaaagaaggcacagagagccacaaaaccggaggtaagtgccggtgggctcagcaggccttgttcgtttgcgtccccaaatagggccttagatccgtgggtacccacgttcttaaaccgaacaaggcctaaggtgcgtgctggagcaacggcgatgtgccagaccggcccatatagagctgatttggtgattggcccaagaatcaggtgaagacagccacgaaccaaacaacccaaaccaggccgtttgcagccaccttaggcaaagtgtgacacccgtgcgttgcaacggggatttctcacggtccatctgtgagttagccacgaaccaaatagtttggtttgtggctaactatcgacgacactgtcaacggcagggcttgttcggttgcgaggacacaaacgaacaaggtcttgctcgtgcgttgcaacggatagtccctagaaaccaaaccagagctgatttggtgatcagtagggctagtttgggagcctagggtaggatacaggatgacatcggatgcaccagatcgttcaaccatatcggtcggctttgacgacaaccagcgagcccttagtccctagaaaccaagcacgaccgaccgaccgacctgcaaccgaccggtttgaccgcccaacttgaccatgggagccacggcttgctgcggctgcaatcggcacaaacgaacaaagcccggcaagttgttcttggctaccaattcgtcgaagccggacaccgtttggtcatctatattttgttcggttagctctcaaccaagcccgaaaaggcccataggcctattagctcagttggtgacccggactaaactttagcgcttctttgccgagtgttgtagttgctttggcagtgtgcggcttctttgccgagtgtctattctttgccgagtgccaaggcaagcgctcgacaaattgtcagttagccacgaaccaaacgaaaaagcactcgacaaagcgatcttagtctctaaattgctcgtgcgagcaagccgtaggacagacactcggcaaagtttaaagagccggattccggtagtatcccacgggcctggctgagacatgattaaggtcttgcgggaagggcacagctgagcaaagaataagggctaaaccgacgcggtttagcccttattcccgtgcgctaagcacgtttgatttgggaatcagacctgatctgaactttggtgacaggaacaagccgcctaggtctccgacgtcgccgcggcgccgcctcggctcgacctctgctgagcgcgcaggatgaagccgctctgttccagtgttgtccccagttgtcgatgcattttgcgcatggaagatgcattttgcgcatggagagagcatctccaacaatgccgacacaaacgaacaagggctgtgtacgactcgtctggcaattggcacggctcaatcagaaagatcatgttgcagcttcacgacccggactaaactttagtgtgctttttagtgtcgtgccaggacttccgagtagcacctgaaacgaacaaggcctaagcaggccttgttcgtttctatcagggcttgttcggttgcannagactgtgtccaacaagcacgtgagttgtgactgcgtgtcggatcggaccaaaacacgcgcgtgggtacccacgttctttgagggtgacttggccagccagtggcaagagaattgaagaacatcaaaactgagggcaccatcgtgcttcgtgccaaatggagggctggacaaaatgctcggccataggctatggcgccgacatagcctatggcgccgagccccgtgcgttgcgacggttctagggctagtttgggagacacatagcctatggcgccgaggtgcttatgggaagggagacagtcttagggtccgcttgtgatgtgccagaccggcccacatgcacgacgaccgttgaaactaaacgaacaaggcctaaagaaagaactaaccttaggcagacgcattggacttgcacgtgtacagcctatggcgccgagtacccccccccccccccccaatgaagtggagtggagcgggcgtggcagaaccggaatggtggtagtccctagaaaccaatcaacggcccagcccgcgattcgctgtgccaaacagggcctaaggtgacagagcctttgtcgacacaaacgaacaagacctaagcagcaagactgacttcgcgtagggctagtttgggagctacctgagccaggctcaccagaggactaagtattggctcggcgcgagaggtcccgagttcaattggcacggctcaatcaattgatgagctagcgcctgcgatgtttggtttgtggctaaatggggcctgtttggtttgtagccagtgttgtccccagttatcatgtgttaaggtggattagggaaaccgaacagggccttagcactcggcaaagaacacttgtggcgcctgagaatccatagaagggtgcgtttggttgcggagagcaggctcggatgagcggacacgctagatctgggggggcacgtgattcacagggacagatcgaaaaggccgtcccttaacaaaactgggacagaacgttagctggaacgattccgggttctttgccgagtgccataacgggcggcgggttcgcgtcgtggcactcggcaaagaaccataaaaagaaatggagggagtgccatagcctatgacgccgaggcccgtttggccatctatacgtttgcgtcgcgctctatagaaaccgaacagggcctaaattagctggaacgattcctggcccgtgcgttgcaacggaaaaaaaagcactcgacaaaaaagggcctgtttggtttgtgtcctaaacactatgctgtgggtcactgtgcgccatcatcaaacccgttcttgctacctgctaatgtgcccgtgcgttgccacggacttggaggtgctactcgaaggctgtaaggggtaggctcacagagtggtggagcgtgcgtcagtagcgacttacgtggcggcaagttgtccttggctattgtgcgtccattggtgaccacagcctatggcgccgagcatcaccagcgacgaggagcacgtttggtttgtggctaatatgccacactttgtctaagtttctaaacactgtgctgtgggtactggcaggtgatgtgccgctctgcattgccgaggctggttcccgtcagcagtagaggcgtggatcagatggtttgctgacacatttctctacggtgcacgagagccacaaaaccggaagcagggatgagacagagcatgacagccgtcggacataagttccttgtgcaggcaaccaaacaacatgatgccgcgggaaaccttgggccgggccggcccggaggccttgttcgtttgtgttaaaacactcggcaaagaatcacggcggcgccggcggcgtcgttggctagagggtggaaggggctgcaggagctgtgccagagagcatctccaacaatgtgtagtccctagaaaccaaacgcagacactcggcaaagtataatgatgtgtttggttcggtgcccgtgcgttgcgacggaacgtgagtgtccgtgcgttgcacatagcctatggcgccgagagccataggctatggcgccgnccgcgggggtcgcctgaggtagaacgtgaccagttaaacggtcaaagtaggatgagtcggtcaccagcgctgcactcaattacactatagtgcctaatcgagttttgtctcgcgggtatgcgtgctttgaccgggtgggacactcggcaaagagccaaatgatcaggttgcgttggtaataatccacatggattgagatgagagctgcaagcctgcaaaaaaaacactcggcaaagaattaaggcctgtaggacttcgcttaggatgtgtttggttgcaataggcagattgtggcgctttgaactgcgcagatcgacgacgctaacttcctagaggctacggtgacctggcgcgcacggttagggctagtttgggagttcggtgctagcacggcacaatcgtggcaaacagtttgtcggctaggcagattgtggcgccttgtatcgcacgagacaggctactttgccgagtgttttttttgttttggaccctttgctcggcacgagtcgagcgagcttacccgggtgcaatccgacgtaacctatggcgccgagcaaaggttttacatcacaggcggttcccgtgcgttgcgacggtacaaagcctttgccgagtgtcgctcgaggacgagctgcttgtcgccacactttgcctaagtttcgtgggtacccacgttcctaggtagcgggtgcgtgtacgatcgcgagctaaacgagctacgctgtgggcgtgcaaatttagacacaaacgaacaaggcttgactggcgggacacgtgtccgaaaaaatctcttgcacctacactcggcaaagccccctttagcggctcgtttgaccgtctaggcaaagtgtgataagttagaaaccgaacagggccttatatgtgcccgtgcgttgcttaaagtctgcttgcacgcttgcttagctggaacgattccggtactagccaggatttggtggggccaagatctatggcgccgaccatagatcttggcgccgacctgtgccaaacagggccattaaacgaacaaggcctaaggtgcaggacgaccattgaaactccagactgtttgcagcccctcaagtgctcggtcgaagactaactgacaggccgcagtgatatcaggggcggacctacgttacagttagcaggccggcatgcccgtgcgttgcaacggcaataggatgtgtttggttgtaaagaacggagcgtcaacgtccagagcatctccaacaatatcatcccactcacgtgtcacgtaccgtacttgtgccagcacggaggcgtaggcgagggattagctgatttggtgaccaggaagtgtgcacgcctacactacgttaacgagccagctcgcgagaaagactttgccgagtgtcatcgcgagctaaacgagccaagtgccaaccagactgcctcggatggacggccaagtcactcagagctaaccgaacaagccgaagatctatggcgccgagctctgcgtgcagatgtggagccgacacaaacgaacaaggttttgaggccttgttcgtttacggtatccgacccgataggaccctgacgcagcaccattggataccattggatgtggagggtaataactaaccttaggtagaagtgtgactgatggtgggtcgaagcccggcacggctattgagctaacttcctagaggcagcaggtttccggcgtgcgcagggatgcattttgcgcatgggaataggctatgacgccgagctaagagggtgtttggttgctgcgaacgacgacaaccggtgagaattcttgtgcgctgggacatgggcctgtttggtttgtggcaaagcctttgccgagtgtagcagctgtgccaaacaaggaggccttgttcgtttgtatcatcgtcgtcgtcggccacggccgcgcttggggtcgacttgtcattctaacagactctccagacacaaacgaacaaggactaaggccttgttcgtttgtgatagactatgtgtgtgggtcgcagcaaaactgagggcacacaaataaaaagaaacggagggaattagaccatatttaatactccaaatggtttaggattaggaggctgaagctgagtcgcgttgacagaagagagcgagcaaggaggaggccgggaagcgggtgtctatgatttgtgggtctccgacccaccaatccagcaaaattagttttataatttgaggcagtctccttggctagtcgacggctgagatcgcagaatgtcgcggggatagggcggacgccataggctgtggcgctgacacagcctatggcgccgagccctgtttggttcgtggctaattagccacgaaccaaacaggcacaaaaatgaggatagactgaggaatggacccatgatgcggcgtcgtcgtcggatgcggagctcggcgccaagatctgttcctgcctcgatgccggcggtgcccgtgcgttgcaacggttcgtgatccattaccacccccacaaaaatgaggataggtcgttggaccgttgcagagtgggccggattggtgggtcggaagcctgtttggttcgtggctatggtgcacggttctgccataacagttagccacgaaccaaaagggtctgtttggttcgtggaggcggttttgtcttagggtcggacgaaaccggtatgagcttagccacgaaccaaacatggtgtcggattgcactcgaaagtggccgccgacgacgacggggtaccgtcgaacttaatggcctcacaaaaaggaggatagtgggtatgctgctcaagttccttttcgggcttgggccggaagtccctagaaaccaaacaaagtccctagaaaccaaacatctaagggccagtttggtaacccggtcatgtgatgagtggcacacaaacgaacaaggccttccgcgccagattggcctccaggactggccgactgggagagaaagtcaaacgcttgatgtgcgggctaaactttagcaggggggcctgtttggtttgatgcttgcaacgcacgggcacataagcgggagagcaagcagaccttagccacgaaccaaacaagagccggctgcaaaccaggatcacctcgtacacggccgccggggggtgtttggtttctaagcaatcccctccggttttgtggagccacaaaaccggaggggggaggggattggaggggctaggagctatcccaaacagtgcccctaatcaccaaatcagccaagggctgatttggtgacccgggacggatacaggacgggaggagatgaagggcgtcgggggggcctgtttggtttgatgacctgtttggttcgtggctatgctgtctacgatgccgtcggtcggcggcgaggtactccagcagatcttggcgccgaggtgctcgcgagctaaacgagccgactaaggggctgtttggttcactgctgacgggagggaaggagggtctgtttggttcgtgaaggtgagtgcccgtgcgatggctgctggtcctgtgcgctggggcctgtttggtttgtgccaggtgagtgcccgtgcgttgggacggctgagatcgcagaacacccccccccccccccccccaaagatccctcggtgctccgaaccaaacaggcccataactgggcctgtttggttcgtggggccacgagcgtgcccgcccaagggctgatttggtgactacccccaaggcaggcatgggccgagtctcaaattccgacccgtggtccggcggcaggaaccacaaaccaaacaagccctagcttgggccagattggagtttaccaacgacctccgggccgaggagctatcccaaacagagccagagcggttgaggtcgtggcagtcccgcgtgtcagtgacgaaccaaacagcacgctaagcggaatcgcgttctttgccgaagggctgatttggtgaccagttcgtcgccggagagtcgccaccggacgcaccgattttcgttcgtttccgtcggattgcccgacgaagcaggggctgcgagggctctacacaggaaaaaagaactgctgctgctgctggttccttatgtccgacggcttcctcacaaaaaggaggataatgtgaggggctgcaaacagccaggctgtttgcagcccctcttcgtttgcgtcggattgcaaaacttggaacggttctggggggggtgtttggtttctatggtgctcgtgccacgtgctgcgagggtgcgaatgttgcggtgatctgtgtttgtgggcctcacgcccttgacaacctggtaggaacgattccgggtgcaatggttacgatgtcctatgcgccaaagatccctcggtgctttcccctccctccctccctcccgacggtgacggtgacggcgaagggctgatttggtgaccggtgtccgtgcgttgcgacggggggtcccgctctggctgattcttgcacgcttgcacataagacatccctgtcctggttgtctgaaccaaacaggccctttcggtgactggtccagtgctcacagcgcaccacgtacaggtccgttccgacccaccaatccaccgagctggattgcttctctgcagcggctgctggctccggagtccctagaaaccaaatacataggttgtttttcagaaaggaaccgaaccgaagaaccgaccgaactaaccgaaccgaggcaggccttgttcgtttgtacgtagcagtgcttgcgtgctaagacgaccgacggcggcgtccaaccaaacgcaccctaagtcgagctgtgttacctcggcggccagaaattgtgtgctttggcatcgttcacgtgggcgagagggctgatttggtgacccgtcccctccggttttgtggctaaaaagcactcggcaaagcgcacgggtacgggtttgggacgtgagagaggagagcggagggctcacaaggtgccacggccgcagcggctgctggctcccaaggcaggcaggcaggcagaccaccacaactgcggcgcggggggggtgtttggtttctagatgcgtcgtgcgggctgctcgcaggccttgttcgtttgggtctggcacgtgacccgaaccggacttttctggcaagtcggggttcgtttccgtcggattatcgaggccgtggaatgcggacgagggctagtttgggagccagaggaatggacccatgatgtatgtttggtttgtggctaaccaggggcagagatccgcgccagcaacttcttaagttgtggaagggctgatttggtgatcaccttcagccttgaccaacctagtcagccgtaggaagttaggctcgacagggacttggtcgttgcaacgcacgggcactcattgcaacgcacgggcactgagggccattgcagagtgggcgttttcatctcccgcagcggtgagtcatgttggctagaggagtgttggcggctagctcccacacgaccgtgatggacctaattagccacgaaccaaacaacaccaacgacctccgggcagattagccacgaaccaaacgacagtccctagaaaccaaacccgttcgtttccgtcggatggcgcaaccgaacaggcccttaggaaccaaacaggccctaagtcagagacaggcgtgtgggtcggtacaaccgaacgggccctttcttcgcgggtacgggtttgtggcatcgcacgggcacctaagcggcacactgcgtagcggcccgcccgcccgcccgcgtccgctaagccgtcggacataagaggccagaggcccaatccagtgctggcacggacacaatttagccacgaaccaaacgtgcgtgggaggccgtgtcgcagtgctcgtacgatgccacggaggagctatcccaaacagggtgggcacagctgagcaaaaaacgggtcttcggctgcctcgcacacaaacgaacaaggcccagcgatggcggcggtgtcccggttgacgccggcccgttagtccacaaaccaaacaggcccgtgcggtgcccgccgcccggcagactcagctagtgcttatgccttgttggaggcgtaggggagtccctagaaaccaaacangacgacgacggaggcgagagtcggctcggctcggctctctggaacaacaggcaccgagataggctatctccagcaggtttaggctaatccaacagacttggagggctagtttgggagtcccgagctccaggcgaggcggccatgggccaggctgggccaaaggcaaagtgtgacaagttagtacgaggccgtcggagatatttttgacactcggcaaagaagagcttcttcgccgagtgtggctgcgttggtaatcggctcgtgccaaatggattcgaacaggtgagtgcccgtgcgttaaggtgagtgcccgtgcgtcgctgtcccggctactgcaactctggacaaaatgctcgttgtatagcctatggcgccgagcacaccaccaggaggagggtacccctggggcccattggtcagtatagcgccgagcaaagggtcgcgtgctagggtttggcgcagggtctgtttggttcgctgacgggtgagttcgcctgtcggcctgtttggttcgtggttaagccgcagcgaacaagccgtgtgtgacattgcagcgtggaggagtggctgtctgcgggatattgctgctgcgggtgattgcctccggttttgtggcttctacacaaacgaacaaggcctgaaactttagcaggagcaaccatgtttggtttgtggctaaagagcacgcgtgaagcccgatacgagccgagtcgagccaccgccggatcggaggatgtcatagggctgatttggtgactagtgtttggttgcgagacagccgttgcaatgacaggacgggacactatgtgtcgtgccgggctcgtatctggtgagcctggccgcatctccagagccaggctgagtcatgttggctagagggcggcggctacaccggcggctcggctgcggctgcggctggtgcaccaagatctgtggcgcccagcagaaacaaacgagcccaggcaggcaggcaggcagcgagactgtcttcagcggttgctccttgcgcacaagatacgtatgtttggtttgtggctaatacgcttgatgtgacccgggcgaagatcgtgtggctggcaacacgggtacgggtttgggatgggctgactggtgttgggccgcgacatacgcagggcagccgcgtagcattgggcgtgtgtgccataggctgtggcgccgagtatctcgggagccaggcccgttcgtttccgtcggattgtgtaaccgtggacgtaacaggagaggtgacgtagaggaggagaaccaaacaggcccatatagcggcttgctgcggctttaaccagcaggccatgtaaacgtttagccacgaaccaaacagtacacaaacgaacaaggcactgccgcagcggtgtcccctggagtccctagaaaccaaacgacgttcctgagcaaccgaacaagatcgtgtttggagcgagccgccataggctatggcgccgcaaagtaggatgagtcgggggaaccaaacagcacgctagtaaccgaacaagccctaatggttggtgtaaccgaacatggctgagctcgctcgactcgtggtgtttggttgcgagacagtcgaagcacgataggcttgctcgagccacaaaaccggagaggcccgagggggatcgaactcgtgcccgtgcgttgcaacgggtctaggctttgccgagtgctctgccgcaggcttggttcctgcctcgctgggttgctcggcgaagcccagggctcccgttatgccgccggagcgctccaggaagtcaaacacttgatgtgagagggctagtttgggagcaagcaatccggtcaggaatcgtggtaccgtcgaacttaaggtggaggggattggaggggttaagcggtccgctacgaaggggacggtagtgttgagcgccttacggcgaggtggactaactgttggtgtaaccgaacatgccttggtgtaaccgaacaagtccatagacggagtggtaggggcagtcgggtgggccgcttcatggggcgacgactcggctagacacaaacgaacaaggcttaggggctttgccgagtgtcaaaggctcacgggccgtgcctgattcatcagtccagcaggctacttttggtgtttggttcgctttttgacactcggcaaaaattagccacgaaccaaacggcgtcgggattccttccaggcgcacgttgctgccaaactagcctccagcaacgtcctctaaacttgcatgtttgtgggggccgccgccgccatcgtcgttatcggccaaagccgtcggacatgcctcgctgggttgctcgacgaaaaccgacgggaataagcgagtcggtacaggaaaccaaagtgtgacactcggcaaagaaagggctgatttggtgatccgctctgtttggcacagcttagtccatcgggtgacggatatcagactgtttgcagcccctctgtgaggggctgcaaacagttgcagaaaccgtcggcccagattctcgtcgcgcggcttcagagccacaaaaccggagagagccgtgcttgggcctgagtctctctcagcggcaggctggtcgtgtccagcgagacgacagcgtgccgtgcttgggccagccgtgcaaggactagcagaagcgggcactcggcaaagaagcccgagactcggagagggcgttgcgcctagagaaggcccacgtgccgtgcctgggccagcatggcccaggcacggcacgcagggggtgtttggtttctaaaagtccctagaaaccaaacgcgggcgcatgacagctattgcaaaacaccttccaacagggcccagcggcccagccacgattccggtgcgcccatcgccaccagggactgcactgcgtacattcggctcggctcggatcggaccctaatcaccaaatcagtctcggtctattcgggttctcgagggctgatttggtgaccagaggcaggcaggcaggcagtgtccctccctccctcccttaaccgcgcagccagctactgcgcccatgtgagaacgaccgcgccataaaccgagcaagccaatgcccgtgcgttgcaacggaagcaacgccgtgtatgtggaactattggagttgctcttagttagccacgaaccaaacagatggtgcacggttctgcctgcctcgcgagctaaacgagccagaggcccaaacacgacccgccgtgccaaccagactgcctcgcagcggctgctggctcccgggggattttctcggccgagactgaagacccctgcgaaaggcgggttcaggtgcgggtttagcacgcaggcgcacttgtcacaggcactcggcaaagaagacgcagcaccattggatgtggcttgactggctcgtcttatttcggttttgctggtgtgctcaggcaagccccggtgcatgccaccggacagcacagagacgaagggctgatttggtgattaagggggaaccgctgcgggagcgaacagggccttagggcgtgtattgccgaagccactggtactcgacaaagcgtactgtggctaatcgtgccgtgcccgtgcccgctgggttggggaagagcttatgtccgacggtctccgtgcccgtgcgttgcgacgggttgcaacgcacggacactcagggctgggaagacactcgccagtttcaacggtcgtcacaagcggcggcggcggcttcgcgttgcgggacagccaggacaagtccctagaaaccaaacagtggaacgattccggttgcaagtcgcgtggtccgtgtgcgttggtttgcatccgggctgcaggtgttgcgacaccgtctataggcaggcaggcaggcagagcgtcgtgccgacccatttatgagggctagtttgggaggctcgtgagttctccgctgctttctccagcaacgtcctctataagtagcaacagacgtcttatcgcttggggtcgacttggctacgcttgatgtgacccggacctggtttgctgcctaaggtggagggtgcgaatgttgcgcctgaaccaaacaggccctatacgtgcctgagccagagttgtagaggctgttcaccttggaggtggtcgcgggcgggtttgggagggtgcgaatgttgcggcgtcctatggaaccaaacataagctcggcgccaagatctattgcggctgcaatccggctgtcaacgtacggacactcacctaccgaccgaccgaccgacctcagtccacagaagcagccagactcggcggcgattgacttggtagcaacgcacgggcatattttttgacactcggcaaaaccagacgccacaccgcgccacgagccgagccgagctgagctgtcttcgcacggatcgaccgcccaaggcgtccagcaccgtctccacgctctacagcggttacgctgacgtggcacgtgagctgatttggtgaccaggaattggctcccgctgcccgccggggtgcaagcatgcaatcaatacaaaccaaacaagccctataggtgattttagcccctctacaatcccctccggttttctcaagggctgatttggtgacaaacacaaacgaacaaggcctcgcttatgtccgacggtcctggaggccgtcggaggtaagggattggatgcctgctgctcgggtggaggcaggaagacgagcgttcttgggggccgattggcagcacggcccagcccgcgataaagcacggcccgacacggcggtgcacggttctgcctatattgctccggcacgaggacgtaccccatccgctctcgggttgaaccaaacaggcccatagttgggcctgtttggttcgtgccgatccggaggagacgaggcgcccgcccgcccgcccgaggtttgcaagggggatgctgccggaacgattccgggtgcagtcaaatcccaacagcaccaagagctcggctcggctcgcttttggctggctggctggctccgggagctatcccaaacaggacgtgcgttcggttaagccctgctctttgccgagtgccagggtcggcggcgaggtactcaaggctgcgatgctcgtgcaccgttgcaacgcacgggcactaacggagctaaggaacggtggccgtgccgtgccggcactatatgtgaggggctgcaaacagattggttgcaatgacaggacgcgggtgaagcggccacatcgcaccccccccccccccccctgtccagtacggttgctccacggtaccgtcgaacttaatgtggcactcggcaaagaagcatacagcactcggcaaagaattggagctatcccaaacagggcttagccacgaaccaaacactcaggaaccgccgaaaataggggtcgcttggaggctaagtctgaaccaaacaggccctaaaacacaaacgaacaaggccagaggctaatccaacagactctccacccacccacccaccccctcggcaaagagccaaatttcaggcaggcaggcaggcacgcggaggggattggaggggctgcaggccttgttcgtttgtgcagggctgatttggtgaccatgctgcatccacacgtacgtccgtgccgtgcttgggccgtgagactgtcttcagcggttccgcggcagtgccctctcccaccgaacccctgccccacccatcccatgtgagaacgaccacgcgaaccgcctgtgatgtaaacatcacaggcggttcggttaaggcggtgaccgaggaggcgaggtgagtgcccgtgcgtcagctaacaggctggcccgacaggcctacgggccgagcctacgcccgtgcgttgcgacgacaaggctggctggctgcgtggcaaaaagcactcggcaaagaaagggctgatttggtgacaaggcagacaacgacgacggcgtaacccagcctgagcacgactaagatccgatcagatatgtgaaaaagacagtggtagtatactagttttgcaactctttttactctagtattgaagtggttaaaggtcaaactaattataagtggacttcgcgcaggatttggatctggtttcgactaattgtcaggattcattccagctcacctgtgatgtgtgactatcggaacgattcctaaccggatgttgtcggctggttgcgccctttttggctcatgccctctacactccatattttgatctatgtccagcactgacttcgacagtggacttcgcgcaggatctaactttgcactatatatagatcggcaagtcatccttggctgctataggctatggcgtcgactaactactagttctagtgcggagatattgacgcggctcattgagccgcgtcaatatctcgaactaaccttaggcacaaagtttatgtcgctgatttgtcccgctacatttggagggtaggtggacttcgcgcaggattgatcttcttgcgcctctactgaagatcacatcaatcccttgttgttgtgcttagtccggctagctaagcctgcgcgtggtgacaattggtcatcgcgcttgtctcttgcccttctcggactgatatagggttgggcctctgggaaatagcattatgtccgagtggacgcctataccatagcccgcattcgtgcgtgaggtgaaacggttctctatctatttgaatccttgccgtgttcgcgaaaagtcaaacgcttgatgtggcatgtcgctcgcccagatcacgagcccggcacgaaataccgatgctcggcgccataggcctaagtcacgcctcaggggatgttcctacactatgtagagtagttgatagccaaggtcgaaaggcactcggcaaagtatgtaagccagcgggcggagtcctcggcaaagaacctaacattgagcctgtaagcgctggggccacatcggctgccacgtagcagtctttgccgagtgccaaacagactttgccgagtgccattagctggaacgattccgagcgacgacgaagggcggttgctccagaccgggctgatccacgtcattgttgtcggtcctcctgatgctgcggtagtggtcctgggcgcagtcttcgccgtgaggccgaaacgtgctcgtggcaagtgctcggcgaaaggccgttgttgttgcttcttcataaaaagacccatgttggtttggtcgaagacctcatagtgacgacattttggacctggtgcggcggacggctggcgtgccgatttgccgagtgccgccgatcagggagaccgaacgggttcaagtccgacaaggccactaacccttgtgcaggcaaccaaatcccgtgcgttgcgacgggaaacgtctttgccgagtgtctcgtcgaagacctcatagtgttaggccgaagcctatcagacaaaaacactcggcaaagaaacaaaacactcggcaaagactcttggtttgacttcgagactgacgacagccgtcggacataaccatagcactcggcaaagaaagagtgaagcaggctatccacccggtcgtactcataaccgcgacctctttgccgagtgcccaagatctatggcgccgaggtcaagatctgtggcgccgagcagtctttgccgagtgccagagctcttgctgccgactgagtggagaccgtgctgtcatcgctggcactcgacaaagaagcaagatgtgaccacgacttggacccagcgggtggtccatttgacgaggagttcgcgaggcaaaggcggcaatcgcctcggccaaagactttgccgagtgcccaagcccgaaaaggcccgtccacacttttcccgccgcagtcaattcgaacgactaaccttaggtgcgcgcagtggagatcgcattcatgtgcattattgcaggcactcggcaaagaagtttctgggttgaacggcggagatgaacacgactgagtgcaggtaggatgtgtttggttggatcaaggtcgaggaccctgtgggtgtacgccgcagcacgggcccatagcactcggcaaaaaagccatagcctatgacgctgatttctttgccgagtgcccgtaggctttgccgagtgtccaggagggtcggctctgataccatggtgttaagtgccggtgggtaagcttatgtccgacggctcccgtgcgttgcaacgggactgggcccaataacttgggagatggatcggctggtcctggcccaagatctacggcgccaaggtgtaagcctgaatgacttgagaggccgttgtcgatgatcgtgtacccgccccacgaatccccgtgcgttgcgacggcttactccctcgggatgactgcagtaagccagcgggcggagccaaaagactcgtgttggtctgccctgaagcggctcagtgcccgtattaggaacgtgggtaccggccaaaccacggcgatctcttgctgagttgctcgatagaaataagctgtgccaaacagccacatcggctgccacgtaagcacatctacaccagcagcataggatgtgtttggttgcagcataggctatggcgccgagcaggctagtttggtgtgtggcactccctcgggatgactgagtggacaggaaaatggattcagtcgaagacctcatagtgccctttgccgagtgtctgcaccgtgacactcggcaaagagccgttggctagagggtggaaaattcagtgactggcactacagaaaactttgttcccaaacacgacgggaattaaaataaagcccgtggctagtctgcgctcggaagccgccgaaaataacctgaagccgccgaaaataaccagtcatggatgagaggagagtgtctcagacacacggcaaaggtctgagacacacggcaaagttctttgccgagtgccatttagatcttggcggcgaacatcacatgtcggggctcagcattttatgtccgacggctttggtgccacactttgtctaagcttggcaaagtgtggcaagtgagcggccaaaccacggcgatggaaaagcactcgacaaagaaacacaaacgaacaagacctttagaccttacttaaggcccaggaagatcgggcatcgtgacggttcgtttctgctggaacaggtccggttagtatagtgccaccgagtgtcggcgaaatgcacctcgaggatgctgacgcaactgggccaattgcgtctttgcagccgcagtcggattaggaacgagtcttttgtgcgcactgtctccgccatctagcgacgtcaaccagatcgcgccccgcaagactgcgcagaagtcaaaaaacgaacaaggcctaagattaggccctgtttggaagcaccactcggcaaagaacgcgatagccttctttgccgagtacttcactctcttctgtcagcttctttgccgagtgtttttttcttttcagcttcggctctggcatgcggcggactgtgctcgtagcacggcactaagcctgcttgagcctgtaagcgctggtgtggaccgaaggcgtggcacgcggccaaaccacggcgacctgcgtcgtcctcctggtgtggctttgccgagtgccagccgtgctaacttcctagagacggccaagcaagattggtcggattgtgagtgtccgtgcgttacaatctagatctaaccgaccaaagatcttggcgccgagctgctggcactcggcaaagaagcatgcgaaggccctgacgctgtgccgagatgccagcctaaggcatcctgcagacggcgtgcaccctgaagcggctcagtgacgcttctttgccgagtgtggtaagcccggcacggctattggatggcctgtttggttcgtgggacgacgacgacgatgacgacagagcaggctcaatggacaagagcaggctcggatgagtgagcctttgccgagtgtcagtttagctggaacgattccggattctttgccgagtgccagattggcactcggcaaagaagctttctttgccgagtgccaaaggaagactggtgcacatgatgtgatgctgcggtagtggtctgagttcagcgaaggggacctagccagggatgatttgcctggcaacccagggtgtttgaagaggtgagtgaccgtgcgttgccaagatctacggcgccgagttctttgccgagtgccaacgtgaggcgaaggcaagcttgcacttcgccagtgcttatcaggaactaagtcgcagcgaggtaaagactttgccgagtgctgtggaagccatcggatgccggagccggatgtgcttgctccgagcctttgccgagtgtcacccgcatgacgaccgttgaaaaaccggcggtgagattgctccacagctggtatcggagcaaagtcgaagacctcatagtgtcaaacacgactgagtgcagggaagagacctacttgcacgatgtgtaagcgatagcggcgaggctaacttcctagaggcaacagagcaggctcggatgagcaggcgagacggactgggcagattggcgaagtcctgcgtagagagtgtctgctggactaacgatgtccgacggcccgccaccgttcttggccctatccacatagcctttgccgagtgtccacgcattcatgtgcattatgcaggcgaggttgacgacgagatcaatcaggagcattttgggtgacggagacagcgtcttcgccggctttttgccgagtgttagtgagaggctgcaaacatttaaacactgtgttgtgggtcccgaccaaaaaatactcgggccgacgactttggccgtcgaaattaggagcgtgggtacccatctgctggtgtgagatggtcccgacgcaaacgaacaagaccgtgcgttgcaacggaaccaccgaattccgtccacgcccggtgtaagcctgaatgaccttagccttctttgccgagtgccgctggctccgtcttcacttgactggacatgtttggtgccggtttggtttgtggctaaataccgacgcaaacgaacaatgctgaacccatgatgcaccaccaagcactcggcaaagaaggcgcttctttgccgagtgtcaaaaacaggaccttgggtcttaatgtgcccgtgcgttgctacttatgtccgacggctttgtcgtttcggcctaggtcttagcaaacctaaacacacgacgtgcgacctctttgccgagtgtcaaaaccggttgaaccgcccctcacaaaaatgaggataggcgacgccgaggtaacacataggtagtgcttctgagtagagtctgcggctactgtgtccggtggcgacgacttcgtacggcgagctgccaggagtaagtatcgtcatggatgagaggagagatcagtgactggtactgcacggcagcccactacggtgtagtggctcgaccggattgcaccgtgatgctgcggtagtggtcaaaaagcactcggcaaagatcgagggtgacttggccagacagccgactactcctacaaattacagctggtatcggagcttggagcttgactctagtccgactacgaccgatttcaggagcgagagcaggctcggatgagagctctgcagatctcccgaagatagcgacgttgctttttgatcttgactctagcgtccgaggacttcgccgagtgtttttcacagctgacaccgaatgccatctttgccgagtgtctgcgatctttgccgagtgccagctggctttgccgagtgccagcaggggcggtctggcgaagtgagaccctacctggcgcgccaaattagtcggttgtccgtgcgttatcaggctgcgttggtaatcttctcgaacacgcaggagagagcaagtctgcgaggcgtggcccgtgcgttgcaacggagacgctgtggacttcgcgcaggcaagcccgaaaaggcccgtactgtgccaaacagggcctactctcgagacttcggatggacctccgcgatacggctgatcagggtgttacgctccggcggcggtttgaccctcaagtgacgagggcctgattggttgccgtatgtgaccgttgatggacgtcttcagttgtggcaaggcggccatagcactcggcaaaggatcggcaggaactgttgtcttctgcgcagaagtcaaacaactttcggtgacgcacttaagctagggctagtttgggagcccaaaacgtctatggatgcagacagtctttgccgagtgcccatttctttgccgagtgccacctcgcgagctaaacgagctattggcgcctgagaatccatgggctgatttggtgaccagaaagtgacactcggcaaagacgcccattgcgacggcgcatggtggcaaagactttgccgagtgcgtgctaaacgggccgtgcctccaacggagcagctaaatgaaccgcttgtgatgtgtggcaccaaaacgaccggatgtgatccgttgtagtctagctagtcaagtgctcggcgaaaggctctccccgctcaggcggaggccccgtgcgttgcaacgagaactgggccaagcccattccagattgcaaccatcagtattatcgtgcgttgctacggagttagcgagcgtagttcagtggtatgcttatgggaagggagacgccgaaccgaaccgaagaaccgattaccaaacacagaacataagggtgcgtttggttgtggctgaattaagtccgacggctcgacgagaggaaggaggacgactccctcgggatgactgtgttctttgccgagtgccacgggctaacttcctagaggcgaccgccgcgccgggccgccacgcaaagacctcagacagctatgtacattcgggccgcccggtaaaagcactcggcaaagaaaggtggtgtgtgcctgatgacccagtgacgggaagacactgcactcgacaaagaaggctcctgcgctaacagacgtggagcttatgtccgacggctttggcggccactgcacgacggcagtaaaagcactcggcaaagccagggtacagaaccctttagggagaggaccgtttagaggacggtgttttgcggagacggatgaggatcccgcttgtgctcttacactcggcaaagactttgcaaaacactcggcaaagagttctgcgcagaagtcaaacagcgttggagcggggtgttttgtataggctatggcgccgagctcctagctcggcgccaagatcaaggctttgccgagtgtgacgtgactgtgagagcgggatgaccacattcgtttctgccctaaggctttgccgagtgtattataggctatgacgccgagcagtagagatggcaatggggatattagcgggctggtgctggcatcgctgcgacccgcatcgggcactcgacaaagaaagcacgttgctgtgagccaggctctcttccgacgggacccgtcttgctgaatattggctgcgcccgtccgacggctagactgacctgggccgtgcccgtccggcgagtgtgacacagttagccacagtcttttgtgcgcactttgcaagagccaagaacgtcgtgcgcacttgttgtgctaagtcgagagccacaaaaccggagaaagacgaagctagcagcgcgtggcactcggcaaagaaactgcagatccgaagacggggtgagcggtccttctatgcaaacgcgaaggttgtcgacgttccccccccccccccccccccataagactggagcatgggagcagcgggtttgggtgtgagttttcactcgtcccgcaaccgttaccgctgcggctataggtcgctaaacactgtgctatgagtcacagatcttggtgccgagcccatagatcttggcgccgggttctttgccgagtgccagctctttgccgagtgccagcgtgctgctctgaccggcggcgcaacgcgatcgaacacgtggaaagatcttggcgccgagctcgactggtttattgggctgcaaagcctcggcccatagtgctggagggctgtaaacatcgtggctggaccgtgctttttttcccatagtctatggcgccgagcgggctaacacggcacgttagttctttgccgagtgccaaaaacaggctatggcgccgagctatgcgggtcgcagcgatggcgcagtgaccgcacttataccacgtggggcagcaggctgcttaggccctgtttggaagcggtttctttgccgagtgcccgacggcaaagcctttgtcgagcttttgtggctcgtgtgctagacactcggcaaagactttgtgacactcggcaaagactttgcagctgacaccgaatgccgtggtggtgtgtgcctgatacccgctgtggacttcgcgcatgcgtgcgttgcaacggaaacaatcgcgatccattaccaccccagacgccgccgaaaataagcagacgccgccgaaaatagcacactcggcaaagtgactcacctgccaaacaggcagcttcaatgactgcagcggcgcctgcgagtgcgacactcggtaaagacaaacttgtgttgtggctgcttctttgccgagtgtctgtccgacccgacggattaggactcgcgcctctactgctgaccgtacatcgctgtgactggcagtgagaagttgccggccgggaggatagaccccacccgcacagtctacgggttccttagacagtctttgccgagtgctttagcactcgacaaaagaaagcaaatctaacccgcgctccctaaggctttgccgagtgttttaaaacactcggcaaagaactggccgacccatttatcgggccccgtgcgttgcgacggcatgactctggtttcggctaattctgccgttaatcgatctggagccacggacggtccagatcgcatcctgcagacggcgtgccagccttctttgccgagtgcgactcggcaaagagggctttgcaagctttgccgagtgccagacgggccacgagtgaggccctaagcttatgtccgacggtcacgattccgggtgcaatccgtaagcttatgtccgacggccgagcagacacgacacagaggggagggcaaggactcgccccgtctgtgcgttgcaacgagaatccgtcggcttaggactaactttgccgagtgtttttttacggctttttgccgagtgctacactcgactgtccaacccggctgtgcactggagcagcatgagctgccaggagtaagtactcaagctttgccgagtgccctccggcacaactaaacaaggcgctgaatattggctgcgctcacactcggcaaagtgaccagcaaacgaacgcagcctaagtggcgacgacttcgtacgacgtgtcgaagtcagtgctggacctttgccgagtgccagcgattctcagcaggaaatcagcaagctaacttcctagaggcccaaacgctatgtccgacggcatacagccgtcggacataatctacggcggctttgccgagtgttttctttgccgagtgcacccagcgaagctgaggcgtgctgcggaccgtgctttgagccaggactggcgggacacgtgtacacactcggcaaagacttcgccggccggccggccggccaccggacaccatgactggcgcagcgctgtgactcaaccttgcgggagctgggcgcgtgggcggatccgaagccatctgccatgaaagatactgggccagtttgcgaccgttgaaactggtgctttggtctaaccgaacaagctcttgcggcttgcctgcccggtccaacggtgctgcgtcaggcaacggctagttgcgtctagaagcactcggcaaagaagccaccgttgcaacgcacgggcattggctgagtctgtggcaggtgtgggggaggcgagggatggcttacatctagtatctgctcccgtgcgttgcaacggaacgaccgaattccgtccacgccgtttgggatggctacaggttactaggtgagtgcctgtgcgatggaccccacctgtaggcgacagcctatggcgccgaggtgttgagcgactccgacgattcagcaaaactgagggcaccacagccagcagaacaagaccctagcctatggcgccgaggtacggctgacaaccgacgggttataggagttccgtagttattcttgctgagttgctcgacggcagcccctcacaaaaatgaggtcgctctaaatcgctacagtggcactcggcaaagaaagctttgcgtggcactcggcaaagatgcttccatcatcacagctgggctgatttggtgaccagatgtgaccgttgatggacataaatgacttgagaggtgtagacgtctttgccgagtgtctgcagacactcggcaaagacgtcgtccacgcccggtcgtacttcggcaaagtcctgctctcgtagggctagtttgggagccgttctttgccgagtgccacccagcctttgccgagtgtccccgtcggaccaagattccacgagttggggtcatcacaggccgcagaagaatagacgaccagcgtctgtgcgttgcaacggagacctcatcgacggagaccgtgccggatttcggcggaccatgcgatgatgctcgctggggcggagactctggcggtcacgttgcgctaacagacgtggggcgagactttgccgagtgtttggcgtgggacgggcttagcacggcgtcccaggcctccttgagaagatcgggcatcgtgacagccaagatctatggcgtcgacaagcggcagaagcgggaccctcgcgcagtggctattgcaacactcggcaaagactttatgactttgtgtgcggtgtggctgcttggactttggatcgctttgcagcggaaatcttattacgtgggtacccacgttcttcccttgaccctgactctgtacattctagtttgcagccgtctgattgaccacacctgtaggtacagcctatggcgccgaaatcagacactcggcaaagaagcctggcactcgacaaagagtatttctttgccgagtgccctaacgacgaagctgggcgagctgaaggccgaagaggagaaagcaagcgctcgacaaattgctctttgccgagtgccagcaatcgtgacgtaagccaacgagcactccctcgggatgactgcggtgacactcggcaaagagatacctcagttgccacatttgcgaagagttgcctactcctccaggccttgttcgtttctaccaaaagcactcggcaaagccggacggcgacagagtggacgggcttctttgccgagtgtccgcagcactccgcatgcggctcaaaagcactcggcaaagagcactcgacaaagcgccctacagtggctaagaggggaggttctggctctcggcaaagactctaaggctctcggcaaagacgtacaaagacgtctttgccgagggaccaggtccagacgtctagctaacttcctagaggcggttcggcgtggctaaggttgtaaatcatcgcgtgcgttgactaaaagcactcggcaaagcgccggcactcggcaaagccggaagctgccaggagtaagtacgtaggatgtgtttggttggggtgttttgccgagtgcctccttaggcgagtcgtgactgcgcgaaacgaacaaggcctaagtcactcggcaaagaacccgctgacggctatactgacagccaaagcacttgagcagccatatgcctcgggcgactactctggagcaacgaccgtcgtcccagcgcatgcggccacgtaggacttatgtccgacggctttcagaaacgaacaaggcctaagccacctacagcggcaggaatgggccaagatctatggcgcatgctcgggtgcgcatgagtaagacctcagttgccacattttgtttgccgagtgccgccgtgagccgcctctaggaagttagcgctaacttcctagaggcggccgcactcggcaaagaacctagcggtgtcatggttgttctgatcgtcggggtagcttttgtacagccgtcggacataatggaggccttgttcgtttctgctctgagcccggaggacttggagcttctttgccgagtgtcattttggacccttagctcggcggcttctttgccgagtgtccccagaccgtcggacataatctacgcagtcacgactcgcctggtgatagtcttttggatgatcgagcagtcatcggacagcgagccttctttgccgagtgttttggtcaaccaatccattccagctcagctcaggagtgatcgatgtggctcggcaacgatagcgatctgattggtccacgtcccgtgcgttgcgacggcacaagacgaagctagcagcgtggaggaggccgtagaaagttaccgtgtgaagcagaccgcccttatgtccgacggctttcctatctccagagccaggctcccaaggccttgttcgtttgcatccgtgtctatgactggtgggagtgcctaagtcacgcctcaagccttctttgccgagtgtcgtcagcagatcacgagcagttccacgtgcggctggactgtacctcagttgccacactttgatggctttgttggagaggtggtgagccgtcgcaacgcacgcaaaagcccatataagtggagctgactgtagcccctaggaaaaacactcggcaaagagccctgcttgcctgctgctgaaagattagtgggttgtcgccagacttcgccagtgcttatcaacttccgtacaatgtgctcgcacagacacgtcatgccggctaaccgaacaaggcctaaatgcgtgggtacccacgttctgaggcaaagactttgccgagggagagtgactccataaaccaacagacactcggcaaagagtctaggctgtctccagcaacgtaagggtgcgtttggttgaatagatcttggcgccgagctacatgaacttgtgagcgtctgacaaagactttgccgagtgtcacgcgatcgaacacgtggaggtgacacagttagccacaaagtgacactcggcaaagagtcgggaccctgttgtgagtggcaagcactcggcaaagaacctgaaagtcaaacgcttgatatcccccccccccccccccaaaaaacacgactgagtgcagtggccaagatctatgacgctgaagatcttggcgccgagctagcaagtccgactcaactttgccagcagcgtcccctaaattcagagagagacagacagacagccatagatcttggcgcctacgccaagatctatggcgcctaggcggtctggcgaagtgtgacaggactttgccgagtgcggtttctttgccgagtgcccgccaagatctgtggcgccaagcgtgccacagatcttggtgccgcaacgacttcatacggcggggggccgtcggacataagcgatagtgccgtgcctaatagttgctcgacaaggacctaatctccgacccaccaatccataacaagttattgggcccacatgctggcatgtgtctgggaagccaagttattgggcccacgtaggggccgtcggacataagacaatcggggtggagcgtaaaatccaatcaggatctcggtagcagacgtagggcggctatccgagctgagctggttcctgtccaagttattgggtccacatgggggccgtcggacataaggcaggcgtcctcagcgacggactgcccgtgcgttgcaacgagactttaccgagtgcggctctcaagatgcagttggtggacgccaagaggaggaccaggagccctgacatgtgggcccatgactctgccaccgtagaccggcgaacagggcctaaggggagtgcctcggtttgctgcgtggaggacggtcgagtgggatggaagctgtccacgaggaagaccagcactcggcaaagggaccgctggtgcgggtgcctctcgggtgaagatcgggcatcgtgatatcgggcactcggcaaagagcttatgtccgacggtcttccgataccagctgtggcggaagtgacactcgacaaagaatattggttgcaatgacaggacacgttgcagcgatggcggccattgctccggcacgaggatgtgcttggatcacgtctctgtgacaaaccaaacaagcccttatctcggacgggcctggctgcgctagcactcggcaaaggcggctagcactcggcaaagtcgctgggatttggacgttgttggaagctgctgggtggcgaagcgttgctgggcgcgttgagggtcgtccgtcctgagtccaacaggcactcggcaaagaggcgcaaacgaccttcgggctggcagcacgagcacgacccgaaggttggtcacctggctgctcttctttgccgagtgccggatctctttgccgagtgccagatcgtgctcgggctagcccaactgcaggcacgcacctcacatggggaaccgctgcgggagattgcgtttggttgcgggtcaggtgctcgtgcgtcacaggcccgaactcgaggtggcgccgcaggagcccgacgtctgctcgttctttgccgagtgccgtgtaagcacgagcaactggctaggttccaggagtgctccaggttttctttgccgagtgcacgatccggtgaagtggtcgaggaggcgattccacggctaggttcgggcactcggcaaagatctcgaggctgaggccgagctgcagcaaaacgcttaggcccctgacactcggcaaagaagcttgaggacaaagtgcgcacaaagaccctcgcggtttcacgggtgagcgatttggcggcggtggcagcggtgcggcttcaggcctctttgccgagtgccaaatgcctcgctgggttgctcagccaggcactcggcaaagaagtcccggtggcagggtggtaggcaccacctgctgcttgaccgcatacggttatgtccgacggtgtactgacccttgccaccgctggtgcgggtgcctcttggtccacggtctgagccgccagcgtggaccgagcgattccgggttccaggagtgctccaagtgacgacgacgacgacgcgccgcaaacaaccattaggtgcaaacgctgcatgtgcgggagcggcgggcgagagggaggcgacgggcgagagcgaggcgatatgaggagtcgtcggaggaggggaagatcgggccgcgtctaccctctgggtgagcgcgattctgattggatgaccgcacccaggggcgagagtggaggcgacctcggtccgcgtgcaagataggcgacttttgctcggacgtgaaccaaacaggcccttagggactaggcaggcttttgctacaagccccgactcttcgctgtgtctgagacacacggcaagcagattggtcgcatctctacaccctaaacactgtgctgtatcattggcgggtggctgagccagcggggtgctggttgggggcgcgcaggctgcgagttgggggagtttggctggggcggggacataggttgatgccgtccgccagggccaccctgcagactgacaagcgatgtgccgccgactgagtgcagggcgaccactggattaaagccgcagcgagatgagtaggagggcgcggcctcatgtgcgctgacgcctacttccgcaggagaggaccagcataaagtagcgcgtgcacccttgaccatgggagccagcgcgttcccggttgcaactcgacccgacctcgacgtgcggtgcgtcgtcctcctggtgtggcagggttgtgggccgttggatctctttgccgagtgccagcctggacgagcggctgtaaatgggcaaagtgtgacaagttatcatggtcgtcaccgtcgtccccacagatcttggcgccgagaggcttcgcaggaccttgtgcgacgcggcttgcggcggtgcgggcactcggcaaagaagtgagtcctcgacgcagggccggccgaacgcgacccagatcaccacgtatcgtggactgagcccgcggacgctgtcgagcccgtggattgggtgggattgaggacactcggcaaagaagtaacctactgctgttgggagggtctactgccgccgataagcccctgtagggcgaagacgcggtccagccagagcgcctgagtcgctgtccaccctgagttccagatgttcgagcgagcgatgtggtatagagtgccttgctggcaggccttgttcgtttgtgtaggcgacttttgctcggatggtggcagggtggtaggccaatccaatcccggaggcggtagggtgaagcgaagggtgagacgccaagatctacggcgccgacttggcgactgccagttcgacaaattggcacggcacgacctgacggaactgttcgcggggaagaaccgcctgtgatagacgtgccggtgggctcggccttgccatagatcttggcgccgaggcgtcgtcgtcggatgtgggaaccgaggaaccgaaccgacgctcaggcggagacccgatattacgctccggcggcccgaaaccgaacaagccctaaggtagaacggagccgttccattccttctacgcctagcactacatgagtgcccgtgcgttgcaacagccaggctacggggagaagtgttggtcgattaagacagctctttgccgagtgccaggacccttcggtgcgccgccggcgtgacgtaagccaacgggcgcatcacaggcggttcggataaagaaccgcctgtgatagtcaggctctgggccggtggggtgaggacggcggcgtgatttgttccttatgtccgacggtttcgggcactcggcaaagaagggtcagcagggtggacaggcgcccgtgcgttgcgacggctcgacactcggcaaagaagctccgaagtctttgccgagtgtgagcctttgccgagtgtcacgcataaagtagcgcgtgcgccagagctgccaggagtaagtaggaggcgtaggcgagggattcactatgtgttacctcggcggttgccgatgtacagttcgcgagaagccagtccacggtcgcacagcctatggcgccgagtaaagcactcggcaaagccccgactgagtgcagggcgactattgcaacgcacgggcacccatcgcgaaccaaacggcacctcgagcactcggcaaagaacccgtgcgttgctacggaatcacctgtgcgacgttggcctgacgggcactcggcaaagatggcgtggtgcggtggatgcggggataggtcccacccgcaggtgggggtgtttggtttctgggcataggctatggcgctgagggtcgacagtctatggatttgcgaaccgcctgtgatgtattgtgtcgtgcctgggccatgcagatgtctcacggcggcgctccgcgatacggctgatcagccgggtcttcggctgcctcgtctctccgcacaagactgcatcgggcactcggcaaagaattccatagcctgtggcgccgagatatgcggacgccaaatctaggtaccgtcgaacttaacatgagcctgacgtaaggcccatcccggggtcgaaacgccgaccctcgttcttggccctatcccctgcggcttctgtttgcgaagtgccggcacgacacgacaggttccagtggattgagcgcggcaaagtgtgacaagttagctttgccgagtgccagatcagacctctggaagcagtcctacacctgccggaaaagtacgactggcattgtgacgtgtggcttgctccggcacgaggacatgcgagccaggctgtggagaagaacgtgacagcacatgcgagctgggtccagcgccaggatgtctcaaagacctcagacagcgagccagctcgcgagctaagagtgtccgtgcgttacagtcgccggctgagggaggcgtccccgtgacataagccagcagccgcgctcggccggtcaggccccacttgttgcgggcgcaccgaagactcccggagctcgggtaacactcggcaaagaagagtgaagccgtggtaacaccagtcacactcggcaaagacttgttgcaacgcacggacacccagagcccaaaaaacccctcactctttgccgagtgtctcccctggcactcggcaaaggaatttctttgccgagtgccacgcgtgctttgccgagtgtcaggagccatctttgccgagtgcttgggctcgggcgaggcgtagagagtctccccgagccaacctgaaccaaacaggcccttaaagcaggggcaaaccaaacaccgctcaggcggagacccaatccacaaaccaaacaggcctttcgcgggtatgggtttgtctggagtcggcggatgttgcgatcgtgatccattaccacacagaatcgctccatccacgaaccaccaccaggaggagggaacgacactcggcaaagaagcccctttgccgagtgccagatcggtagcaacgcacgggcataccgcgtcagcacgcgactgtgagggctgatttggtgactggcactcggcaaagaacctatgtggcaggtccgcgcagttgcactattggagttgctctaatggctttttacatcacagacgcaatccctggaccggcggtagttgtgctagtccggctgcacgctgactacagggctgccatccggtgaagtggtcgaggggaagtcgtcgtgctgcgtaggctcaggaggtagccccagaaggagcagctcatgccggatgtgtcgtgcctgggccaccagtgtctatgacatgtggggcggtgcaagcatgcaatcgaggacggtcacggcgatgtgcgcaatccagggagcttcggcatccgttgttggagatgccctctctttgccgagtgtcttccgccctcggctcactggagtgggccagagttatgcgctgggcgtctcgaccggagtctgccttggtgtaaccgaacatgtttccgcgatatggttgatcggcgggaagagcatacctgcagcaccctcgcgtgcgacactcgagcctgacgtaaggcctcggagctgacgttgacgatgacagcgtcagcatgttgcgtccgggctgaacgggccgtgcctgggttaggggttcgggtatagaagctgctgggtggcgtactgcccgtgcgttgcgacggctgccaggaggaggtctgcgccgagacttcggatggccacggaactggaacaaagcggctcattgcactcggcaaagacacagcgtggactggcttctccgcggaaagttgatgagcagccgtcgaagcgaaactcgggcacgggactgcagcaatgagggtccgaagccatctgccatggagaggactgtttagaggacgcgagagggaggctgtgcactagactcagctagtgcttttgattgttaggctaactccagccggggattttctcggccggaacagcactcggcaaagaagcgaatcgtctgcttctcgcaacgggcactcggcaaagacgtctgcatagatgggccggtctgagcctgacgtaaggcccaccccctccggttttgtggctcagctgaacgatcccttggggtcgcgctatctgccgggtttgcctactctctggccgacggctccaaaatcgccgtccgcagtctttgccgagtgcttgtcctctttgccgagtgccacgcgactgagtgcagggcgactggccaatgatgatgacgccgaggcactcggcaaagaagtttctctttgccgagtgtctagagcctcgtacagggccgtcggcggcgaagggtggggttggctgagctcgctcgactcgtagtcttttgactgcaaggacagggccctagggcggttgaaccgaagctgctgggtggcgaacgtcagcagggtggacagacggcaggctgttgatcgcttggcagcccagaaccggcacgacctggcactcggcaaagggagacacaaacgaacaaggccatcaggagtaagtaccgccggttggtggtccggtggcgcaacgaggccgccaaggcggaagggctgtccaccctgagtttccaggacttagggcgggtgcactgtgaggggctgcaaacattgccatagatcttggcgccaagatggccaaacggcggtccggcatactgcagtaccgtgcgctctggcactcggcaaagtactctttgccgagtgtctactagtccctagaaaccaaacgtcgaattcggaagctcgacctccagctggatgacactcggccataaagtagcgcgtgcatcttgcacgacggagagtgtggctggtgtcggacgaatacggcactcggcaaagaacctatactcgtcggccgacctcgccaggaggagcgtcgacgagggccgcgtgaggggcctgttcagtgcgcggttgtggtgggaggcgctcaggcggagacccgcttgtcgtaggaagttagcgccggcactcggcaaagaaggtcgtctccgggttaagcttccggacaaccactacgatgagctccgatggcatactggcgaagtgtgactgcgtcgagctccactcgtcggcggcgaggagtcggcccaggcacggcactagcgatggcggggattcctgagatggtgcacggttctgccgaggatggcgctgaagcgcgcgaggctgcgttggtaatcgactgaatcgtctgcttctcgcagcgtggaccgagcgattccgacgttgcaacgcatgagcacttccggtgaagtggtcgaggcgggggtgtttggtttctacgagcactcggcaaagaaagaacgggccagcccggcacgatcaccgtccagaagaaacagtcccgagggaattcagcgaaggctctttgccgagtgtctaccgtcgaagtcagtgctggaccgagcaggttagcgcgagcttgctcttcttcgacggatctgaaggtccaggacctccacagtgactgtggcagactggcttccgcccctgccactgcgcatgggttaggggttcgggtactgccatagactatggcgccgaccgcgatacggctgatcggcaaggcactcggcaaagatgggacactcggcaaagaaggaaaggggacgctgctggagacaacccgacagcctgtttgggctgttttatttcgggcactcgttcgtcgtctgcggggtggacaacggaggagggttgaggccgcctgagcggggagcaggaactattggagttgctctaaggtgacactcgacaaagaggtcggaccgtccgagtatgtcaagcctttgccgagtgtcatcacgacggtcagtcggcgagcgtcgtctgggcagggcgtaagctctggatggtttgattgcttagccacgaaccaaacatactgaccacgaatcaagcaaacactcggcaaagaacctcttccacacctgcacaccacaagccgctaacttcctacggcagctaccccgacgatggcgagtggacggtcgagtgggatgttaaggcctccagagcggtggacgcgaagctaccgtgtgcccccagcggggtgctggttggcggacataagccttcggccgtcgtggtgcggtggatgcggatttcctgggagcctggctgcgtcgcaacgcacgggcatgtaggcaaaccagagacgctagcaaaggctttgccgagtgtatgtgacactcgacaaagaagcggaaagttgatgagcagacgccataggctgtggcgctaagagccacaaaaccggaggagcctccggttttgtggctcccctctttgccgagtgccatatcagagacttggtcgtccgctggacgcaatcggacggtcgaccgtgccgtgcttgggccggggcactaaaaagcacggccacaatcccctccggttttatgcgcgtccgcggcgtgtggcgaaagtcaaacgcttgatatggagcttgactctagtccgccgtggcggacccagaaattggacccccccccccccccccaaatcattggcgggtggctggggagtgggaagcagaccggtgatagagaatgcacccaggccactcgtgcgttgcaacgggagagaagaaggctcaagcaaacatgtgtctgggaagcggtgcaatcccctccggtttttgggccatagatcttggcgcctatgtgacactcgacaaagagattgctgggttgctcgacggggaatgagctttgcggggaggagggtctgtttggttcgctagccaagatctgtggcgccaagcaccaagatctgtggcacctttttgacactcggcaaagtgagtgtccgtgcgttacagaagggctgatttggtgactcgacgggctggcccgacacagtaaaaagcactcggcaaagaggtgcttagtccggctgcaccactgacaggcgatgtgccgcgaccgcaactgctgctatcacgtggtcgtgcgcgctttccagggcccgttcggttgacagggcggtcacgtcgaggtacgggcagacagcaaggactgcgcactcgatcctaggctggctcttccgcaggagaggacagggaaggttttgccgagtgtcatatgggtccgcccctgcctggagtgtccgtgcgttacaggggcactcggcaaagaagcaagtactctatgagccggcgatcccacttgttgcgggcgcagctggtctagaactgtttccgtgtgacactcgacaaagagtgacactcggcaaagaagcaataggtggatgcccgtgcgttaaccgaacaaggccttaaagtccctccctccctccctcctttgctccggcacgaggacctagtcctctcgtgcaaatcggagcaggaggcagagcaggcaagtcatgaaccaaacaagcccgaagcccatgtgagaacgaaaacattttagtttgcagtcttgctcggaggacctgttggacacgcagtggcggagcaccgagccacaaaaccggagggacctccggttttgtggctcacgctcaggaggtagccccggatcggctcgactcggctcgtgggctgcgttggtaatcgaccaggatctgtccgattgccccctggcactcggcaaagtctggactgagtgcagggcgaccgcgagttgtgatgtggtgagcttccaggagtgctccaggtcgaatgaacccatgatgcaccccaattccccgtggatcagctggtcagctcggctcggatcgaggcgtcctcagcgacggaggttggactgtcgagtgggagccgagtggctgctgtactaagggactgcactgcgtaaaccgtctccgcttgggtcggctgtgacgctagcgctgcaggccctggtcctgacgtcccgacagagctgccaggagtaagtgggcgcatggctgggcgttggcgagactgcgagggctcaggcgtgccgaggacggaaggcccgccataggctatggcgtcgtccgacccgttgcgatcgagcccacttgttgcgggcgtaggccaaacactcgacgaacgagtcgcaacgcacgggcactcctggaccgcttgtcttcccccaactcagctagaggcccttcacagtgcggcacaaagctatgggtcggaagcggggcaccgtgatgtcccaggcggttcggggtgctgagccccgacatgcttttcgggcttgggccgggtcgtgatccattaccacctctggagtggaccgtgttgccgcaggcactcggcaaagaagcccctacagcgcctcctacgtcgtggaccgagcgattctgggaaccaaacaggccctatatggacggtcgagtgggatgctagccggctgcaaaccagaatgaacgacgacgagatcgagttgatcagccgccgcccgctccgagccctctttgccgagtgaagggctgatttggtgatcgtggcccagagtagtcgcacggaggttgtcgatgttccaggtgggcagcatccgacggacgaggctggaggctagcaggaccactatttcgctctccagcagttcccgttgcaacgcacggaggccatgagggactccctgccggcccggtggcactatggcgttaggtgcaagcgtgtaacgggcactcggcaaagagctaggcgggggcagtctacaatcggtggttgcggtggcggcggctgatcaggctgcgttggtgtgacacagttagccacgaacgaacgcagcggtaccctcggaagttggctcgtccacgtctaggtgtacatttgggtcggccgcgacctggttggcgatcgcgtgttgtggcccatgaccgagccacaaaaccggaggaacctccggttttgtggctctaccgtgccgtgcttgggccgattggtgtaaccgaacaagccgaaccaaacaggccctaggtaaccttgtccgcgtgagcgacaagatgcagttggtggacaagcactcggcaaagaaagtaggcgtcgtcgtcggatgctgagagtgactccacaaaccaacgggccagcccggcacggatactcggcaaagcctcggattcgttggctctcggcaaagaggccatagactatggcgctgacagtttcaacggtcgtctcggggggagcgacaactgccgtgagcggggagcgtagggcaatgcccgtgcgttgcaacaacacggctgtctgcgctatgcggagccacaaaaccggagcaggtaggtgcccgtgcgttgccgtagcaacgcacgggcattcgttttcttagtgggctgggcgtcgcaacgcacgggcacctccgtgccacggacggtccaggactgagtgcagggcgacctgggcggagtctgacgtaaggcgtggcgtcgacgtggcctcggttgctgggataacttggttgcgtgaccggccgagcgcgtaggcgaagtcgtgcgtgcagtagcggttgcgtgcgcaggcatgggtaagccgatcctagcggcgaagggtggggttagcgcacccaacaacctgcttcactggttgtgggttgggccagcgagtgtcggttgatctgagtggcccagagtagtcgcccgtcgtgtcggaccgtgctttgcagagcgaagctgaggcgaggacgacttcgtacggcgggcggtgacgctcccgaagcggaaagggctgatttggtgactgcttcggctctgcgccatcctgctggccgtgggcttgacttgaggacaaagtgcgcactaatggtacggcgtggcacaacgaccacgtaccgaccaggtgcttctttgccgagtgccatggtaggctctagggttcttgaggcctcgctgggttgctcggtcaagatgcagttggtggatgccaacggtgctgcgtcaggggactctcaacgaaagcagttgacactcggcaaagaagcacggtgacactcggcaaaggcggcttgcagcgattgagcctagaaccaggttgcagggatggcgagacttcggatggccgcgcggcggctttgccgagtgctggcactcggcaaagaagctcgcctcgctgggttgctcaaccgtaccgaccaggtgcgcagaagctgaggcgtgctgcgtacacccgttttgctgcgctctcggcggctttgccgagtgtcgacactcggcaaagaagtctctcggcaaaggctcggattcgagccgagccgagctgacctggaccaaggtccgatctacctccggtgaagtggtcgacgaggggacgggtttggggagctgtcaaaacaggtggtggactcaggagtaagtaccgcctgtcaacggtggcttccctaggagggttgaccgacgaggacgtgacgacgacgacgacgcgtcccgctaacttcctacggccggactctcgggttgttctgggcaaccaaacgcaccctaagaaggcaggcaggcaggcatgtccaagaggaggaccaggatctggactttgtgtgcggtgtgggcctgtttggtttgtggctaggcccattacagaggggtggtggggccaacagggcgaatggcactcggcaaagaaggctctctttgccgagtgtctgcttcttgcgcagccggagctccgcttgcagcgattgagcctggaggcctggacgcgaacgggctggtgcgggtgcctctcagtgcctgggccggcccatcgtcactcggcaaagaacctgacagcagctgtcccaaacagggcgggcactcggcaaagatttcgagcactcggcaaagatcggtgtccgtgcgttgcgacggcttcagacactcggtaaagacatagacacagacggtcccaactgaccgaccatgaattctctggctgtgactgcgcgctcccctaacaggggttgggtgggaaggggagacttcgctcggtgtctttgccgagtgccgttcatcgggtagcgggtatggggcagaggagcagcggagaagacaacccctggaccgggacccgagcactcggcaaagacccgccgaaccaaacaggccctacaggcggaggccaagctggctggattgagtgagattgggtgagcaggctcgcgtgaggccaggtctttgccgagtgccagggagatggcgctaatgacgaccagaccgggctgatccacgagagtctccccgagccacccatgaaccgagcgagccacgacttcgcgggtatgggtttgggctgtcaggagtaagtaccagccttgcctcgggcagagccgacgacgacgacgacgcgcgaagatctatggcgccgaggtgacagcggcagcacgggggaggttctgtagcgctggactgcaagatctgtggcgccgagcctagctcggcgccacagatccggtgggctcggccttcttatgcccgtgcgttgcaacagagagggatgcggagtctgggactggcactcggcaaagtcttctgcgcaccttccttcgtcgaggtctttgccgagtgctgagtgacactcgacaaagagaacaaccaaacgcaccctaaagatggaccagcacgaggcacggagcggggagcgtagggcatgtatctggctggccaggatgcgtctcgaccggagtctgctctaataggccggcccaaatctgggccgtgccagaaattgtggcgtcgtcgtcggatgcttgaacaagctggccatcgtgactctttgccgagtgccacacgcgtacaggagggtcgatggaggcccattacagagggtgaggcgaagtcgtgcgtccagcgacgctagccaaaggctttgccgagtgtaatccggtgaagtggtcgagggctgtgacactcgacaaagaagtcggaaagttgatgagcagacattagccacgaaccaaacataggccataggctgtggcgctaaacacagcctatggcgccgagcagagccacaaaaccggaggaggcctccggttttgtggctcccactctttgccgagtgccatattcagagacttggtcgtccgctcatcattggcgggtggctgagcggacgcaatcggacggtcgagccgtgccgtgcttgggccgggggcactaaaaagcacggccagcaatcccctccggttttatggcgcgtccgcggcgtgtggcgtaaagtcaaacgcttgatatgagagcttgactctagtccgcctgtggcggacccagaaattggcacccccccccccccccccaaaatcattggcgggtggctgggcgagtgggaagcagaccggtgcatagagaatgcacccaggccgactcgtgcgttgcaacgggaagagaagaaggctcaagcaaatcatgtgtctgggaagcggtgtcaatcccctccggtttttggagccatagatcttggcgcctactgtgacactcgacaaagagagttgctgggttgctcgacgggcgaatgagctttgcggggaggaagggtctgtttggttcgctacgccaagatctgtggcgccaagccacagatcttggcgccgagagcaccaagatctgtggcaccgtttttgacactcggcaaagtagagtgtccgtgcgttacagacagggctgatttggtgactcggacgggctggcccgacacagtcaaaaagcactcggcaaagagcgtgcttagtccggctgcacccactgacaggcgatgtgccgccgaccgcaactgctgctatcaccgtggtcgtgcgcgctttccgagggcccgttcggttgacaggggcggtcacgtcgaggtacgaggcagacagcaaggactgcgggaaccaaacaggcccatataccactcgatcctaggctggctgcttccgcaggagaggacaggagaaggttttgccgagtgtcaaagggctgatttggtgacaaggtatgggtccgcccctgcctgggagtgtccgtgcgttacaggcggcactcggcaaagaagcaaagtactctatgagccggcgatgcccacttgttgcgggcgcaggctggtctagaactgtttccggtgtgacactcgacaaagagtcgacactcggcaaagaagcaagtaggtggatgcccgtgcgttgaaccgaacaaggccttaaagaagcgtcagcatgttgcgtccgtccctccctccctccctccttttgctccggcacgaggacctaagtcctctcgtgcaaatcggcagcaggaggcagagcaggcagcgggcactcggcaaagaagttagtcatgaaccaaacaagccccgaagcccatgtgagaacgacaaacattttagtttgcagtcgttgctcggaggacctgttggtacacgcagtggcggagcacccgagccacaaaaccggagggaacctccggttttgtggctcacagctcaggaggtagccccggattcggctcgactcggctcgtgaggctgcgttggtaatcgaccgaggatctgtccgattgccccactggcactcggcaaagtctgtgactgagtgcagggcgaccggcgagttgtgatgtggtgagccttccaggagtgctccaggtcccgctcaggcggagacccgatggaatgaacccatgatgcaccaccaattccccgtggatcagcctggtcagctcggctcggatcagaggcgtcctcagcgacggacggttggactgtcgagtgggacgccgagtggctgctgtactagaagggctgatttggtgatccaagggactgcactgcgtaaacccgtctccgcttgggtcggctcgtgacgctagcgctgcaggccagggctgatttggtgaccggacctggtcctgacgtcccgactagagctgccaggagtaagtgcggcgcatggctgggcgttgggcgagactgcgagggctcaggtcgtgccgaggacggaaggccacgccataggctatggcgtcgacaccggacgcaccgattttcgtccgacccgttgcgatcgaggcccacttgttgcgggcgtaggctggtgcgggtgcctctcggagccaaacactcgacgaacgacgtcgcaacgcacgggcactcactggaccgcttgtcttccccacaactcagctagaggccctttacaaaccaaacaagcccttatcacagtgcggcacaaagctaatgggtcggaagcggggcaccggtgatgtcccaggcggttcgggggtgctgagccccgacatgccttttcgggcttgggccgggctcgtgatccattaccacctctcatgtgtctgggaagcggtgctggagtggaccgtgttgccggcaggcactcggcaaagaagccagccttctttgccgagtgcctccctacagcgcctcctacgtacgtggaccgagcgattctggcgaaccaaacaggccctatatgaggtgagtgcccgtgcgttgtggacggtcgagtgggatgctgctttgccgagtgccagatcggagccggctgcaaaccagaatggaacgacgacgagatcgagtctgatcagccgccgcccgctcccgagccctctttgccgagtgcaagggctgatttggtgatcggaaaaagcactcggcaaagaaacgagttgtgatgtggtgagcttggcccagagtagtcgcacgagaggttgtcgatgttccaggatgggcagcatccgacggacgaaggctggaggctagcaggacgcactatttcgctctccagcaggttcccgttgcaacgcacgggaggccatgagggactccctgtccggcccggtggcactatggccgttaggtgcaagcgtgtaagcgggcactcggcaaagagctcaggcgggggcagtctacaatacggtggttgcggtggcggcgggctgatcaggctgcgttggtaccctaatcaccaaatcagtccgtgacacagttagccacgaatcgaacgcagcggtaccctcgagaagttggctcgtccacgtcgtaggtgtacatttgggtcgggccgcgacctggttggcgatctgcgtgttgtggcccatgacccgagccacaaaaccggaggaaacctccggttttgtggctctaacaatcccctccggtttttggcccgtgccgtgcttgggccgatttggtgtaaccgaacaagcccgaaccaaacaggccctaggtaaaccttgtccgcgtgagcgaccaagatgcagttggtggacaacactcggcaaagaacctatactggcccaggcacggcacgcaagtgccgtgcctgggccagcaaagcactcggcaaagaaagtacggcgtcgtcgtcggatgctggagagtgactccacaaaccaaacgggccagcccggcacggatgactcggcaaagcctcggatttcgttggctctcggcaaagagggccatagactatggcgctgagcagtttcaacggtcgtctcgcgggggagcgacaactgccgtcgagcggggagcgtagggcaaatgcccgtgcgttgcaacaacaacggctgtctgcgctatgcgggagccacaaaaccggagcagagtaggtgcccgtgcgttgccaagtgtgacactcggcaaagaagtagcaacgcacgggcattcagtgctttgccgagtgtcaggggttttcttagtgggctgggccgtcgcaacgcacgggcacctaccgtgccacggacggtccagagactgagtgcagggcgaccttgggcggagtctgacgtaaggccgtggcgtcgacgtggcctcgggttgctgggataacttggtcgggggtgtttggtttctaaactgcgtgaccggccgagcgcggtaggcgaagtcgtgcgtgcatgtagcggttgcgtgcgcaggccatgggtaagccgatcctaggcggcgaagggtggggttagctgcacccaacaacctgcttcagctggttgtgggttgggccaggcgagtgtcggttgatctgagctggcccagagtagtcgcccgatcgtgtcggaccgtgctttgacagagcgaagctgaggcgagctcgtatctggtgagcctggctgacgacttcgtacggcgggcaggtgacgctcccgaagcggacaagggctgatttggtgactggcttcggctctgcgccatccttgctggccgtgggcttgacttgttctttgccgagtgccagcttgaggacaaagtgcgcactaaatggtacggcgtggcacaacgaaccacgtaccgaccaggtgcgttctttgccgagtgccatggttaggctctagggttcttgagagcctcgctgggttgctcggtgcaagatgcagttggtggatgaccaacggtgctgcgtcagggggactctcaacgaaagcagtttgacactcggcaaagaagcacgggtgacactcggcaaaggcgcgcttgcagcgattgagcctaggaaccaggttgcagggatggtcgagacttcggatggccgcgacggcggctttgccgagtgcttggcactcggcaaagaagctctgcctcgctgggttgctcaacgcgtaccgaccaggtgcgcagaaagctgaggcgtgctgcgtatgagcggggagcgtagggcaagcacccgttttgctgcgctctccggcggctttgccgagtgtccgacactcggcaaagaagtctcctcggcaaaggctcggattccgagccgagccgagctgacctcggaccaaggtccgatctaccatccggtgaagtggtcgacgacggggacgggtttggggagctagtcaaaacaggtggtggacttcaggagtaagtaccgcctgtccaacggtggcttccctaggaagggttgaccgacgaggacgtcgacgacgacgacgacgcgtcgccgctaacttcctacggccgcgactctcgggttgttctgggccaaccaaacgcaccctaagagaggcaggcaggcaggcatgtcccaagaggaggaccaggatcatggactttgtgtgcggtgtggggcctgtttggtttgtggctattgcaacgcacgggcactcataggcccattacagaggggtgagtggggccaacagggcgaatcggcactcggcaaagaaggctcctctttgccgagtgtctgctgtcttgcgcagccggagctccggcttgcagcgattgagcctgggggggtgtttggtttctaggaggcactcggcaaagaagttttgaggcctggacgcgaacggggaggcggttttgtcttagggttttctttgccgagtgccagatcctggtgcgggtgcctctcagtatcattggcgggtggctgagttgcctgggccggcccatcgtgcactcggcaaagaacctgacaagcagctgtcccaaacagggccgggcactcggcaaagattttcgagcactcggcaaagatcgtgtgtccgtgcgttgcgacggacgggcactcggcaaagagcttttagccacgaaccaaacaactcttcagacactcggtaaagaacatagacacagacggtcccacactgaccgaccatgaattcttctggctgtgactgcgcgctccttctttgccgagtgccaaaacccctaacaggggttgggtggtgaaggggagacttcgctcggctgtctttgccgagtgccgttccatcgggtagcgggtatgggggcagaggagcagcggagaagcacaacccctggaccgggaccacgagcactcggcaaagacccggccgaaccaaacaggccctagcaggcggaggccaagctggcgtggattgagtgagattgggtggagcaggctcgcgtgaggccgaggtctttgccgagtgccagaggagatggcgctaatgacgatccagaccgggctgatccacggagagtctccccgagccaccccatgaaccgagcgagccacgagcttcgcgggtatgggtttggggctgtcaggagtaagtaccacgccttgcctcgggcagagccagtcagcagggtggacaggcgggacgacgacgacgacgcgcgcaagatctatggcgccgaggtagacagcggcagcacgggggagggttctgtagcgctggactgacaagatctgtggcgccgagctctagctcggcgccacagatctcggtgggctcggccttcttattgcccgtgcgttgcaacagaagagggatgcggagtctgggaggacactcggcaaagaagtcttctggcactcggcaaagtctttctgcgcaccttccttcgtcggaggtctttgccgagtgctgaagtgacactcgacaaagagaatcaaccaaacgcaccctaaagaatggaccagcacgaggcacgggagcggggagcgtagggcatggtatctggctggccaggatgacgtctcgaccggagtctgctgctggtctagaactgtttccgactaataggccggcccaaatcatgggccgtgccagaaattgtgggcgtcgtcgtcggatgctttgaacaagctggccatcgtgaactctttgccgagtgccacacagcgtacaggagggtcgatggcaggcccattacagagggtgagggcgaagtcgtgcgtccagca

SEQ ID NO: 7958 - DNA, 21 bp, Zea mays
ttgctttcttcagatctccca

SEQ ID NO: 7959 - DNA, 21 bp, Zea mays
agggatggcaacgggtcggat

SEQ ID NO: 7960 - DNA, 21 bp, Zea mays
caaccgaacggggccttaggg

SEQ ID NO: 7961 - DNA, 21 bp, Zea mays
gtaggaagttagtcagctgac

SEQ ID NO: 7962 - DNA, 21 bp, Zea mays
cggagtgtggcgcggtgtggc

SEQ ID NO: 7963 - DNA, 21 bp, Zea mays
actaaagtggaataaaatgta

SEQ ID NO: 7964 - DNA, 21 bp, Zea mays
cccccatcactagcgggccgt

SEQ ID NO: 7965 - DNA, 21 bp, Zea mays
taatttagggactaaaatgaa

SEQ ID NO: 7966 - DNA, 21 bp, Zea mays
attatataagttggattatga

SEQ ID NO: 7967 - DNA, 21 bp, Zea mays
taaaatgagtggtgatgattt

SEQ ID NO: 7968 - DNA, 21 bp, Zea mays
atgtgcacatgagcaccgtac

SEQ ID NO: 7969 - DNA, 21 bp, Zea mays
gagggcgccgccgtcgtcatc

SEQ ID NO: 7970 - DNA, 21 bp, Zea mays
aaaatggaataaaatgaaggg

SEQ ID NO: 7971 - DNA, 21 bp, Zea mays
atagactaaagtggaataaaa

SEQ ID NO: 7972 - DNA, 21 bp, Zea mays
aagccgtcggacataaggctc

SEQ ID NO: 7973 - DNA, 21 bp, Zea mays
ttaataagtagtagagatata

SEQ ID NO: 7974 - DNA, 21 bp, Zea mays
taataagtagtagagatatat

SEQ ID NO: 7975 - DNA, 21 bp, Zea mays
atttttagtccatctatttta

SEQ ID NO: 7976 - DNA, 21 bp, Zea mays
aaaaaaaaagactgagtaatc

SEQ ID NO: 7977 - DNA, 21 bp, Zea mays
agggacacgctcgaaggctca

SEQ ID NO: 7978 - DNA, 21 bp, Zea mays
agcggatcagacagagtgcta

SEQ ID NO: 7979 - DNA, 21 bp, Zea mays
aacggaggggattggagaatc

SEQ ID NO: 7980 - DNA, 21 bp, Zea mays
gcctaaggttaggcagattgt

SEQ ID NO: 7981 - DNA, 21 bp, Zea mays
tagtccctagaaaccaaacac

SEQ ID NO: 7982 - DNA, 21 bp, Zea mays
attatataagttggattatgt

SEQ ID NO: 7983 - DNA, 21 bp, Zea mays
gatctaacggaccaagaggct

SEQ ID NO: 7984 - DNA, 21 bp, Zea mays
aacattcgatgtgataaggac

SEQ ID NO: 7985 - DNA, 21 bp, Zea mays
ggaaggcaccgcactgcgaga

SEQ ID NO: 7986 - DNA, 21 bp, Zea mays
gagagaattgtggagagttag

SEQ ID NO: 7987 - DNA, 21 bp, Zea mays
atggattggatgagattgagt

SEQ ID NO: 7988 - DNA, 21 bp, Zea mays
agagacgttagatctaagatg

SEQ ID NO: 7989 - DNA, 21 bp, Zea mays
actaaaatggaataaaatgta

SEQ ID NO: 7990 - DNA, 21 bp, Zea mays
aagggctgatttggtggtaag

SEQ ID NO: 7991 - DNA, 21 bp, Zea mays
acgccggagggggaggtggag

SEQ ID NO: 7992 - DNA, 21 bp, Zea mays
ccgacggctgtcagataagcc

SEQ ID NO: 7993 - DNA, 21 bp, Zea mays
atgtccgacggctgtcagata

SEQ ID NO: 7994 - DNA, 21 bp, Zea mays
ttgaactaagaaatagcagaa

SEQ ID NO: 7995 - DNA, 21 bp, Zea mays
tggattatggtggaagggtag

SEQ ID NO: 7996 - DNA, 21 bp, Zea mays
attatggtggaagggtaagag

SEQ ID NO: 7997 - DNA, 21 bp, Zea mays
ggagttcctaccgagttgcta

SEQ ID NO: 7998 - DNA, 21 bp, Zea mays
gggcttcttcttgcgcaggcc

SEQ ID NO: 7999 - DNA, 21 bp, Zea mays
tagtccctagaaaccaaacag

SEQ ID NO: 8000 - DNA, 21 bp, Zea mays
tcgtctaacctcaatctcatt

SEQ ID NO: 8001 - DNA, 21 bp, Zea mays
atttaagggaactgttgaatg

SEQ ID NO: 8002 - DNA, 21 bp, Zea mays
gattggaggggattgagtgaa

SEQ ID NO: 8003 - DNA, 21 bp, Zea mays
attggaggggattgagtgaaa

SEQ ID NO: 8004 - DNA, 21 bp, Zea mays
tgagcagtgcaatatataatt

SEQ ID NO: 8005 - DNA, 21 bp, Zea mays
agatctagatctaacggatca

SEQ ID NO: 8006 - DNA, 21 bp, Zea mays
actaaaatggaataaaatgga

SEQ ID NO: 8007 - DNA, 21 bp, Zea mays
attatataagttggattatgg

SEQ ID NO: 8008 - DNA, 21 bp, Zea mays
ggttccaagggactcggacaa

SEQ ID NO: 8009 - DNA, 21 bp, Zea mays
ggttcacaaaatgtaacgtaa

SEQ ID NO: 8010 - DNA, 21 bp, Zea mays
tgtgccagaagcggcgatggg

SEQ ID NO: 8011 - DNA, 21 bp, Zea mays
ggcgctcgtggccgccgtgct

SEQ ID NO: 8012 - DNA, 21 bp, Zea mays
aaccacaagatgcagttggtg

SEQ ID NO: 8013 - DNA, 21 bp, Zea mays
tgtgcaagcgtgcaagcaaat

SEQ ID NO: 8014 - DNA, 21 bp, Zea mays
taagggcttgttcggtttgag

SEQ ID NO: 8015 - DNA, 21 bp, Zea mays
agagacgttagatctaaaatg

SEQ ID NO: 8016 - DNA, 21 bp, Zea mays
agcagcagcaggcggcgccga

SEQ ID NO: 8017 - DNA, 21 bp, Zea mays
gtgcccgtggcgctggaggcc

SEQ ID NO: 8018 - DNA, 21 bp, Zea mays
agtgattcatcaaaccaaaca

SEQ ID NO: 8019 - DNA, 21 bp, Zea mays
aatacatgtggattgaggtca

SEQ ID NO: 8020 - DNA, 21 bp, Zea mays
ccactggcggttggtgtaaca

SEQ ID NO: 8021 - DNA, 21 bp, Zea mays
aatacatgtggattgagctca

SEQ ID NO: 8022 - DNA, 21 bp, Zea mays
caaccctaaaaaccgacggga

SEQ ID NO: 8023 - DNA, 21 bp, Zea mays
cggagaggattggaggggcta

SEQ ID NO: 8024 - DNA, 21 bp, Zea mays
ttgctggttcttgtgggtttt

SEQ ID NO: 8025 - DNA, 21 bp, Zea mays
aagctggattatggtggaagt

SEQ ID NO: 8026 - DNA, 21 bp, Zea mays
ccggggctggaggtggaggtg

SEQ ID NO: 8027 - DNA, 21 bp, Zea mays
tcggcgacgaggagcacctca

SEQ ID NO: 8028 - DNA, 21 bp, Zea mays
actaaagtggaataaaatgga

SEQ ID NO: 8029 - DNA, 21 bp, Zea mays
ggccagatgttcacgctgggg

SEQ ID NO: 8030 - DNA, 21 bp, Zea mays
aaatttagaggacgctgttaa

SEQ ID NO: 8031 - DNA, 21 bp, Zea mays
ccgtgagaagcgcagggaccg

SEQ ID NO: 8032 - DNA, 21 bp, Zea mays
actaaaatggaataaaatgaa

SEQ ID NO: 8033 - DNA, 21 bp, Zea mays
aggtgatggcaggacgacttt

SEQ ID NO: 8034 - DNA, 21 bp, Zea mays
caaggaggcagcggggcgaag

SEQ ID NO: 8035 - DNA, 21 bp, Zea mays
aggaccgaccaggcgcctaat

SEQ ID NO: 8036 - DNA, 21 bp, Zea mays
ttgttttttttttggcccatt

SEQ ID NO: 8037 - DNA, 21 bp, Zea mays
atgcacaaaacgaaatctggc

SEQ ID NO: 8038 - DNA, 21 bp, Zea mays
gtgtttggttggatgtacaag

SEQ ID NO: 8039 - DNA, 21 bp, Zea mays
actaaagtggaataaaatgca

SEQ ID NO: 8040 - DNA, 21 bp, Zea mays
ctgcacatgcagtgatgcctg

SEQ ID NO: 8041 - DNA, 21 bp, Zea mays
ggtctaaacgaacaagccctg

SEQ ID NO: 8042 - DNA, 21 bp, Zea mays
aacgattcggtggattataat

SEQ ID NO: 8043 - DNA, 21 bp, Zea mays
aaatcggagaagattagaggg

SEQ ID NO: 8044 - DNA, 21 bp, Zea mays
tatgacatgtggggccagtgg

SEQ ID NO: 8045 - DNA, 21 bp, Zea mays
gccgccggctgggtgctcgat

SEQ ID NO: 8046 - DNA, 21 bp, Zea mays
ccgagaggattggaggggatt

SEQ ID NO: 8047 - DNA, 21 bp, Zea mays
aggattggaggggattgaggg

SEQ ID NO: 8048 - DNA, 21 bp, Zea mays
aacattcgatgtgatagtgat

SEQ ID NO: 8049 - DNA, 21 bp, Zea mays
aacatcatgtggttcagatta

SEQ ID NO: 8050 - DNA, 21 bp, Zea mays
tttgcacggttgcacggaggg

SEQ ID NO: 8051 - DNA, 21 bp, Zea mays
cgtcataatttgatatcgtgt

SEQ ID NO: 8052 - DNA, 21 bp, Zea mays
tctggttttgctgtcgccgag

SEQ ID NO: 8053 - DNA, 21 bp, Zea mays
cagcggctgcaggagcggccc

SEQ ID NO: 8054 - DNA, 21 bp, Zea mays
attatggtggaagggtaggat

SEQ ID NO: 8055 - DNA, 21 bp, Zea mays
tgtgggcgaggagatatgcag

SEQ ID NO: 8056 - DNA, 21 bp, Zea mays
tggattatggtggaagggtga

SEQ ID NO: 8057 - DNA, 21 bp, Zea mays
ttttgtgcgagtcttgtatct

SEQ ID NO: 8058 - DNA, 21 bp, Zea mays
aactaaaaagaaacggagaga

SEQ ID NO: 8059 - DNA, 21 bp, Zea mays
gattggaggggattgaggtgg

SEQ ID NO: 8060 - DNA, 21 bp, Zea mays
attggaggggattgaggtgga

SEQ ID NO: 8061 - DNA, 21 bp, Zea mays
acggctcgacacggcttggat

SEQ ID NO: 8062 - DNA, 21 bp, Zea mays
atactaaaatggaacaaaatg

SEQ ID NO: 8063 - DNA, 21 bp, Zea mays
tctggatagtttgattgcaca

SEQ ID NO: 8064 - DNA, 21 bp, Zea mays
tggtgcaagcatgcaatcaat

SEQ ID NO: 8065 - DNA, 21 bp, Zea mays
gaaactggcagagtagcgaag

SEQ ID NO: 8066 - DNA, 21 bp, Zea mays
atgagtataaaatctgatggc

SEQ ID NO: 8067 - DNA, 21 bp, Zea mays
acaaatatctgaaccaaacgg

SEQ ID NO: 8068 - DNA, 21 bp, Zea mays
ggttaggctttaggtcgacgg

SEQ ID NO: 8069 - DNA, 21 bp, Zea mays
ttgccgagcgtcagacgttga

SEQ ID NO: 8070 - DNA, 21 bp, Zea mays
ggtgcatgcttctttgttacg

SEQ ID NO: 8071 - DNA, 21 bp, Zea mays
agacttgtgagtcattttcat

SEQ ID NO: 8072 - DNA, 21 bp, Zea mays
atgtgttaaggtggattagga

SEQ ID NO: 8073 - DNA, 21 bp, Zea mays
taatttagggactaaaatgga

SEQ ID NO: 8074 - DNA, 21 bp, Zea mays
cgctgctgctgctgctcctgt

SEQ ID NO: 8075 - DNA, 21 bp, Zea mays
gactaatcgcgattagtcgtc

SEQ ID NO: 8076 - DNA, 21 bp, Zea mays
accgccgtgatgatgtgcgcg

SEQ ID NO: 8077 - DNA, 21 bp, Zea mays
agggctagtttggaaactcaa

SEQ ID NO: 8078 - DNA, 21 bp, Zea mays
actaaagtggaataaaataaa

SEQ ID NO: 8079 - DNA, 21 bp, Zea mays
taatttagggactaaaataga

SEQ ID NO: 8080 - DNA, 21 bp, Zea mays
aactagagacgttagatataa

SEQ ID NO: 8081 - DNA, 21 bp, Zea mays
acagctacaggcactttcggc

SEQ ID NO: 8082 - DNA, 21 bp, Zea mays
attatataagttggattataa

SEQ ID NO: 8083 - DNA, 21 bp, Zea mays
aatggcgagcttgagacgttt

SEQ ID NO: 8084 - DNA, 21 bp, Zea mays
tttttgtgaggggctgcagca

SEQ ID NO: 8085 - DNA, 21 bp, Zea mays
ggggccgggcggtgggggcca

SEQ ID NO: 8086 - DNA, 21 bp, Zea mays
cggccacggccacggcgtcgg

SEQ ID NO: 8087 - DNA, 21 bp, Zea mays
ttggattttgattggatgcac

SEQ ID NO: 8088 - DNA, 21 bp, Zea mays
aatacatgtggattgaggtga

SEQ ID NO: 8089 - DNA, 21 bp, Zea mays
cagtgtatatgggtgactcgg

SEQ ID NO: 8090 - DNA, 21 bp, Zea mays
tttgtgaggggctgcaaagag

SEQ ID NO: 8091 - DNA, 21 bp, Zea mays
tgggcgttcccgaggaacgtc

SEQ ID NO: 8092 - DNA, 21 bp, Zea mays
acggttctactcggagggtct

SEQ ID NO: 8093 - DNA, 21 bp, Zea mays
ggagagcctaagcatctcaag

SEQ ID NO: 8094 - DNA, 21 bp, Zea mays
aactagagacgttagatctaa

SEQ ID NO: 8095 - DNA, 21 bp, Zea mays
ggttgaagagtagaatagagt

SEQ ID NO: 8096 - DNA, 21 bp, Zea mays
attggaggggattgaggggga

SEQ ID NO: 8097 - DNA, 21 bp, Zea mays
atggagtggattgagggggcc

SEQ ID NO: 8098 - DNA, 21 bp, Zea mays
gtggcaagagaattgaagaaa

SEQ ID NO: 8099 - DNA, 21 bp, Zea mays
agagacgttagatctaaaata

SEQ ID NO: 8100 - DNA, 21 bp, Zea mays
cggtccctggtgtgtgtggct

SEQ ID NO: 8101 - DNA, 21 bp, Zea mays
tggattatggtggaagggtaa

SEQ ID NO: 8102 - DNA, 21 bp, Zea mays
gtaggaagttagtcagctgat

SEQ ID NO: 8103 - DNA, 21 bp, Zea mays
ttcggcgcgagagaggagaat

SEQ ID NO: 8104 - DNA, 21 bp, Zea mays
tatataagttggattatataa

SEQ ID NO: 8105 - DNA, 21 bp, Zea mays
caagtaggctgatggggattg

SEQ ID NO: 8106 - DNA, 21 bp, Zea mays
ctagcagactgcttgcggctt

SEQ ID NO: 8107 - DNA, 21 bp, Zea mays
caggtgtaccccgagaccatc

SEQ ID NO: 8108 - DNA, 21 bp, Zea mays
gtgtgggtgtgggtgtggcgc

SEQ ID NO: 8109 - DNA, 21 bp, Zea mays
catcatcacctcattcctcat

SEQ ID NO: 8110 - DNA, 21 bp, Zea mays
aaggaatgaggtggtgatgga

SEQ ID NO: 8111 - DNA, 21 bp, Zea mays
gatctaacggaccaagaggcc

SEQ ID NO: 8112 - DNA, 21 bp, Zea mays
acccgggatcccgggaggatc

SEQ ID NO: 8113 - DNA, 21 bp, Zea mays
cccttgtcaccaaatcaacct

SEQ ID NO: 8114 - DNA, 21 bp, Zea mays
  unsure (19): n = A, C, G or T
gcttattttcggcggctancc

SEQ ID NO: 8115 - DNA, 21 bp, Zea mays
atccgacccgttgccatccct

SEQ ID NO: 8116 - DNA, 21 bp, Zea mays
ccctaaggccccgttcggttg

SEQ ID NO: 8117 - DNA, 21 bp, Zea mays
gtcagctgactaacttcctac

SEQ ID NO: 8118 - DNA, 21 bp, Zea mays
gccacaccgcgccacactccg

SEQ ID NO: 8119 - DNA, 21 bp, Zea mays
tacattttattccactttagt

SEQ ID NO: 8120 - DNA, 21 bp, Zea mays
acggcccgctagtgatggggg

SEQ ID NO: 8121 - DNA, 21 bp, Zea mays
ttcattttagtccctaaatta

SEQ ID NO: 8122 - DNA, 21 bp, Zea mays
tcataatccaacttatataat

SEQ ID NO: 8123 - DNA, 21 bp, Zea mays
aaatcatcaccactcatttta

SEQ ID NO: 8124 - DNA, 21 bp, Zea mays
gtacggtgctcatgtgcacat

SEQ ID NO: 8125 - DNA, 21 bp, Zea mays
gatgacgacggcggcgccctc

SEQ ID NO: 8126 - DNA, 21 bp, Zea mays
cccttcattttattccatttt

SEQ ID NO: 8127 - DNA, 21 bp, Zea mays
ttttattccactttagtctat

SEQ ID NO: 8128 - DNA, 21 bp, Zea mays
gagccttatgtccgacggctt

SEQ ID NO: 8129 - DNA, 21 bp, Zea mays
tatatctctactacttattaa

SEQ ID NO: 8130 - DNA, 21 bp, Zea mays
atatatctctactacttatta

SEQ ID NO: 8131 - DNA, 21 bp, Zea mays
taaaatagatggactaaaaat

SEQ ID NO: 8132 - DNA, 21 bp, Zea mays
gattactcagtcttttttttt

SEQ ID NO: 8133 - DNA, 21 bp, Zea mays
tgagccttcgagcgtgtccct

SEQ ID NO: 8134 - DNA, 21 bp, Zea mays
tagcactctgtctgatccgct

SEQ ID NO: 8135 - DNA, 21 bp, Zea mays
gattctccaatcccctccgtt

SEQ ID NO: 8136 - DNA, 21 bp, Zea mays
acaatctgcctaaccttaggc

SEQ ID NO: 8137 - DNA, 21 bp, Zea mays
gtgtttggtttctagggacta

SEQ ID NO: 8138 - DNA, 21 bp, Zea mays
acataatccaacttatataat

SEQ ID NO: 8139 - DNA, 21 bp, Zea mays
agcctcttggtccgttagatc

SEQ ID NO: 8140 - DNA, 21 bp, Zea mays
gtccttatcacatcgaatgtt

SEQ ID NO: 8141 - DNA, 21 bp, Zea mays
tctcgcagtgcggtgccttcc

SEQ ID NO: 8142 - DNA, 21 bp, Zea mays
ctaactctccacaattctctc

SEQ ID NO: 8143 - DNA, 21 bp, Zea mays
actcaatctcatccaatccat

SEQ ID NO: 8144 - DNA, 21 bp, Zea mays
catcttagatctaacgtctct

SEQ ID NO: 8145 - DNA, 21 bp, Zea mays
tacattttattccattttagt

SEQ ID NO: 8146 - DNA, 21 bp, Zea mays
cttaccaccaaatcagccctt

SEQ ID NO: 8147 - DNA, 21 bp, Zea mays
ctccacctccccctccggcgt

SEQ ID NO: 8148 - DNA, 21 bp, Zea mays
ggcttatctgacagccgtcgg

SEQ ID NO: 8149 - DNA, 21 bp, Zea mays
tatctgacagccgtcggacat

SEQ ID NO: 8150 - DNA, 21 bp, Zea mays
ttctgctatttcttagttcaa

SEQ ID NO: 8151 - DNA, 21 bp, Zea mays
ctacccttccaccataatcca

SEQ ID NO: 8152 - DNA, 21 bp, Zea mays
ctcttacccttccaccataat

SEQ ID NO: 8153 - DNA, 21 bp, Zea mays
tagcaactcggtaggaactcc

SEQ ID NO: 8154 - DNA, 21 bp, Zea mays
ggcctgcgcaagaagaagccc

SEQ ID NO: 8155 - DNA, 21 bp, Zea mays
ctgtttggtttctagggacta

SEQ ID NO: 8156 - DNA, 21 bp, Zea mays
aatgagattgaggttagacga

SEQ ID NO: 8157 - DNA, 21 bp, Zea mays
cattcaacagttcccttaaat

SEQ ID NO: 8158 - DNA, 21 bp, Zea mays
ttcactcaatcccctccaatc

SEQ ID NO: 8159 - DNA, 21 bp, Zea mays
tttcactcaatcccctccaat

SEQ ID NO: 8160 - DNA, 21 bp, Zea mays
aattatatattgcactgctca

SEQ ID NO: 8161 - DNA, 21 bp, Zea mays
tgatccgttagatctagatct

SEQ ID NO: 8162 - DNA, 21 bp, Zea mays
tccattttattccattttagt

SEQ ID NO: 8163 - DNA, 21 bp, Zea mays
ccataatccaacttatataat

SEQ ID NO: 8164 - DNA, 21 bp, Zea mays
ttgtccgagtcccttggaacc

SEQ ID NO: 8165 - DNA, 21 bp, Zea mays
ttacgttacattttgtgaacc

SEQ ID NO: 8166 - DNA, 21 bp, Zea mays
cccatcgccgcttctggcaca

SEQ ID NO: 8167 - DNA, 21 bp, Zea mays
agcacggcggccacgagcgcc

SEQ ID NO: 8168 - DNA, 21 bp, Zea mays
caccaactgcatcttgtggtt

SEQ ID NO: 8169 - DNA, 21 bp, Zea mays
atttgcttgcacgcttgcaca

SEQ ID NO: 8170 - DNA, 21 bp, Zea mays
ctcaaaccgaacaagccctta

SEQ ID NO: 8171 - DNA, 21 bp, Zea mays
cattttagatctaacgtctct

SEQ ID NO: 8172 - DNA, 21 bp, Zea mays
tcggcgccgcctgctgctgct

SEQ ID NO: 8173 - DNA, 21 bp, Zea mays
ggcctccagcgccacgggcac

SEQ ID NO: 8174 - DNA, 21 bp, Zea mays
tgtttggtttgatgaatcact

SEQ ID NO: 8175 - DNA, 21 bp, Zea mays
tgacctcaatccacatgtatt

SEQ ID NO: 8176 - DNA, 21 bp, Zea mays
tgttacaccaaccgccagtgg

SEQ ID NO: 8177 - DNA, 21 bp, Zea mays
tgagctcaatccacatgtatt

SEQ ID NO: 8178 - DNA, 21 bp, Zea mays
tcccgtcggtttttagggttg

SEQ ID NO: 8179 - DNA, 21 bp, Zea mays
tagcccctccaatcctctccg

SEQ ID NO: 8180 - DNA, 21 bp, Zea mays
aaaacccacaagaaccagcaa

SEQ ID NO: 8181 - DNA, 21 bp, Zea mays
acttccaccataatccagctt

SEQ ID NO: 8182 - DNA, 21 bp, Zea mays
cacctccacctccagccccgg

SEQ ID NO: 8183 - DNA, 21 bp, Zea mays
tgaggtgctcctcgtcgccga

SEQ ID NO: 8184 - DNA, 21 bp, Zea mays
tccattttattccactttagt

SEQ ID NO: 8185 - DNA, 21 bp, Zea mays
ccccagcgtgaacatctggcc

SEQ ID NO: 8186 - DNA, 21 bp, Zea mays
ttaacagcgtcctctaaattt

SEQ ID NO: 8187 - DNA, 21 bp, Zea mays
cggtccctgcgcttctcacgg

SEQ ID NO: 8188 - DNA, 21 bp, Zea mays
ttcattttattccattttagt

SEQ ID NO: 8189 - DNA, 21 bp, Zea mays
aaagtcgtcctgccatcacct

SEQ ID NO: 8190 - DNA, 21 bp, Zea mays
cttcgccccgctgcctccttg

SEQ ID NO: 8191 - DNA, 21 bp, Zea mays
attaggcgcctggtcggtcct

SEQ ID NO: 8192 - DNA, 21 bp, Zea mays
aatgggccaaaaaaaaaacaa

SEQ ID NO: 8193 - DNA, 21 bp, Zea mays
gccagatttcgttttgtgcat

SEQ ID NO: 8194 - DNA, 21 bp, Zea mays
cttgtacatccaaccaaacac

SEQ ID NO: 8195 - DNA, 21 bp, Zea mays
tgcattttattccactttagt

SEQ ID NO: 8196 - DNA, 21 bp, Zea mays
caggcatcactgcatgtgcag

SEQ ID NO: 8197 - DNA, 21 bp, Zea mays
cagggcttgttcgtttagacc

SEQ ID NO: 8198 - DNA, 21 bp, Zea mays
attataatccaccgaatcgtt

SEQ ID NO: 8199 - DNA, 21 bp, Zea mays
ccctctaatcttctccgattt

SEQ ID NO: 8200 - DNA, 21 bp, Zea mays
ccactggccccacatgtcata

SEQ ID NO: 8201 - DNA, 21 bp, Zea mays
atcgagcacccagccggcggc

SEQ ID NO: 8202 - DNA, 21 bp, Zea mays
aatcccctccaatcctctcgg

SEQ ID NO: 8203 - DNA, 21 bp, Zea mays
ccctcaatcccctccaatcct

SEQ ID NO: 8204 - DNA, 21 bp, Zea mays
atcactatcacatcgaatgtt

SEQ ID NO: 8205 - DNA, 21 bp, Zea mays
taatctgaaccacatgatgtt

SEQ ID NO: 8206 - DNA, 21 bp, Zea mays
ccctccgtgcaaccgtgcaaa

SEQ ID NO: 8207 - DNA, 21 bp, Zea mays
acacgatatcaaattatgacg

SEQ ID NO: 8208 - DNA, 21 bp, Zea mays
ctcggcgacagcaaaaccaga

SEQ ID NO: 8209 - DNA, 21 bp, Zea mays
gggccgctcctgcagccgctg

SEQ ID NO: 8210 - DNA, 21 bp, Zea mays
atcctacccttccaccataat

SEQ ID NO: 8211 - DNA, 21 bp, Zea mays
ctgcatatctcctcgcccaca

SEQ ID NO: 8212 - DNA, 21 bp, Zea mays
tcacccttccaccataatcca

SEQ ID NO: 8213 - DNA, 21 bp, Zea mays
agatacaagactcgcacaaaa

SEQ ID NO: 8214 - DNA, 21 bp, Zea mays
tctctccgtttctttttagtt

SEQ ID NO: 8215 - DNA, 21 bp, Zea mays
ccacctcaatcccctccaatc

SEQ ID NO: 8216 - DNA, 21 bp, Zea mays
tccacctcaatcccctccaat

SEQ ID NO: 8217 - DNA, 21 bp, Zea mays
atccaagccgtgtcgagccgt

SEQ ID NO: 8218 - DNA, 21 bp, Zea mays
cattttgttccattttagtat

SEQ ID NO: 8219 - DNA, 21 bp, Zea mays
tgtgcaatcaaactatccaga

SEQ ID NO: 8220 - DNA, 21 bp, Zea mays
attgattgcatgcttgcacca

SEQ ID NO: 8221 - DNA, 21 bp, Zea mays
cttcgctactctgccagtttc

SEQ ID NO: 8222 - DNA, 21 bp, Zea mays
gccatcagattttatactcat

SEQ ID NO: 8223 - DNA, 21 bp, Zea mays
ccgtttggttcagatatttgt

SEQ ID NO: 8224 - DNA, 21 bp, Zea mays
ccgtcgacctaaagcctaacc

SEQ ID NO: 8225 - DNA, 21 bp, Zea mays
tcaacgtctgacgctcggcaa

SEQ ID NO: 8226 - DNA, 21 bp, Zea mays
cgtaacaaagaagcatgcacc

SEQ ID NO: 8227 - DNA, 21 bp, Zea mays
atgaaaatgactcacaagtct

SEQ ID NO: 8228 - DNA, 21 bp, Zea mays
tcctaatccaccttaacacat

SEQ ID NO: 8229 - DNA, 21 bp, Zea mays
tccattttagtccctaaatta

SEQ ID NO: 8230 - DNA, 21 bp, Zea mays
acaggagcagcagcagcagcg

SEQ ID NO: 8231 - DNA, 21 bp, Zea mays
gacgactaatcgcgattagtc

SEQ ID NO: 8232 - DNA, 21 bp, Zea mays
cgcgcacatcatcacggcggt

SEQ ID NO: 8233 - DNA, 21 bp, Zea mays
ttgagtttccaaactagccct

SEQ ID NO: 8234 - DNA, 21 bp, Zea mays
tttattttattccactttagt

SEQ ID NO: 8235 - DNA, 21 bp, Zea mays
tctattttagtccctaaatta

SEQ ID NO: 8236 - DNA, 21 bp, Zea mays
ttatatctaacgtctctagtt

SEQ ID NO: 8237 - DNA, 21 bp, Zea mays
gccgaaagtgcctgtagctgt

SEQ ID NO: 8238 - DNA, 21 bp, Zea mays
ttataatccaacttatataat

SEQ ID NO: 8239 - DNA, 21 bp, Zea mays
aaacgtctcaagctcgccatt

SEQ ID NO: 8240 - DNA, 21 bp, Zea mays
tgctgcagcccctcacaaaaa

SEQ ID NO: 8241 - DNA, 21 bp, Zea mays
tggcccccaccgcccggcccc

SEQ ID NO: 8242 - DNA, 21 bp, Zea mays
ccgacgccgtggccgtggccg

SEQ ID NO: 8243 - DNA, 21 bp, Zea mays
gtgcatccaatcaaaatccaa

SEQ ID NO: 8244 - DNA, 21 bp, Zea mays
tcacctcaatccacatgtatt

SEQ ID NO: 8245 - DNA, 21 bp, Zea mays
ccgagtcacccatatacactg

SEQ ID NO: 8246 - DNA, 21 bp, Zea mays
ctctttgcagcccctcacaaa

SEQ ID NO: 8247 - DNA, 21 bp, Zea mays
gacgttcctcgggaacgccca

SEQ ID NO: 8248 - DNA, 21 bp, Zea mays
agaccctccgagtagaaccgt

SEQ ID NO: 8249 - DNA, 21 bp, Zea mays
cttgagatgcttaggctctcc

SEQ ID NO: 8250 - DNA, 21 bp, Zea mays
ttagatctaacgtctctagtt

SEQ ID NO: 8251 - DNA, 21 bp, Zea mays
actctattctactcttcaacc

SEQ ID NO: 8252 - DNA, 21 bp, Zea mays
tccccctcaatcccctccaat

SEQ ID NO: 8253 - DNA, 21 bp, Zea mays
ggccccctcaatccactccat

SEQ ID NO: 8254 - DNA, 21 bp, Zea mays
tttcttcaattctcttgccac

SEQ ID NO: 8255 - DNA, 21 bp, Zea mays
tattttagatctaacgtctct

SEQ ID NO: 8256 - DNA, 21 bp, Zea mays
agccacacacaccagggaccg

SEQ ID NO: 8257 - DNA, 21 bp, Zea mays
ttacccttccaccataatcca

SEQ ID NO: 8258 - DNA, 21 bp, Zea mays
atcagctgactaacttcctac

SEQ ID NO: 8259 - DNA, 21 bp, Zea mays
attctcctctctcgcgccgaa

SEQ ID NO: 8260 - DNA, 21 bp, Zea mays
ttatataatccaacttatata

SEQ ID NO: 8261 - DNA, 21 bp, Zea mays
caatccccatcagcctacttg

SEQ ID NO: 8262 - DNA, 21 bp, Zea mays
aagccgcaagcagtctgctag

SEQ ID NO: 8263 - DNA, 21 bp, Zea mays
gatggtctcggggtacacctg

SEQ ID NO: 8264 - DNA, 21 bp, Zea mays
gcgccacacccacacccacac

SEQ ID NO: 8265 - DNA, 21 bp, Zea mays
atgaggaatgaggtgatgatg

SEQ ID NO: 8266 - DNA, 21 bp, Zea mays
tccatcaccacctcattcctt

SEQ ID NO: 8267 - DNA, 21 bp, Zea mays
ggcctcttggtccgttagatc

SEQ ID NO: 8268 - DNA, 21 bp, Zea mays
gatcctcccgggatcccgggt

SEQ ID NO: 8269 - DNA, 21 bp, Zea mays
aggttgatttggtgacaaggg

SEQ ID NO: 8270 - DNA, 21 bp, Zea mays
  unsure (3): n = A, C, G or T
ggntagccgccgaaaataagc

SEQ ID NO: 8271 - DNA, 83 bp, Zea mays
ggaccgcactagggatggcaacgggtcggattcagatcggatattgaaaatatccgcccgcagtcatatccatggtcatagat

SEQ ID NO: 8272 - DNA, 181 bp, Zea mays
ccttcccaggcaaccgaacggggccttagggtgtgttcgtttattccggaatcgtgacctagaaccaatccaaccaggaatgcttatctaatttgtataggctttaatcacctggaaccattcctgccccaatcctgaacaaacgaacgcagccttagggcccgttcggttcttggggatt

SEQ ID NO: 8273 - DNA, 71 bp, Zea mays
gaagttagtcgtaggaagttagtcagctgacggcgctgacggcgtgaagctactaactttcgagaatctac

SEQ ID NO: 8274 - DNA, 95 bp, Zea mays
agcttacggcgccgcagcccgccacacctgcggcggccgatttgggcgccacacccgcggcagccggagtgtggcgcggtgtggcgcccgagcca

SEQ ID NO: 8275 - DNA, 125 bp, Zea mays
atttagtcccttcattttgttctattttagtatataaattgacaaatatagaaactaaaatagagttttagtttctacatttgataattttgtaactaaagtggaataaaatgtagggactaaaa

SEQ ID NO: 8276 - DNA, 227 bp, Zea mays
  unsure (94)..(95)..(96)..(97)..(98)..(99)..(100)..(101)..(102)..(103): n = A, C, G or T
gaaccctggccccccatcactagcgggccgtcaccgcccactctgcaacggcccagccggagggtggcgcgcaagacgtaacccgggagcggannnnnnnnnnactccatctggcagccttgctgagtgtgcagtggaagtcgagggtttccttggcctcagttgcctaggcgagctcaggcatccgtccgcataggtgtcgttggcgtagtggtggaaccccacga

SEQ ID NO: 8277 - DNA, 105 bp, Zea mays
tgcagtttattccattttagttcctaaattaccaaatacggaaaccaaaactctattttagtttttatatttagtaatttagggactaaaatgaaataaaatgaa

SEQ ID NO: 8278 - DNA, 211 bp, Zea mays
tcactcctatattatataagttggattatgatgtaaggatatggtgggtaaaatatcacattgggatctcaaataagctgaaatatgctacacaaataagctgaaataagctagcattgggtagcttattttagcttatttatgatcccaaagtggtattttacccctctcacccttccaccataatccaacttatataatctatgtggga

SEQ ID NO: 8279 - DNA, 178 bp, Zea mays
tgcacatattaaatcgccactattcatctcagatttaacgtctctggttgatcattgtaatttacaaataacactttccaccactacaacccaccacgtcagaagatgtctttaacaaatataccaaacaactacagacgttagatctaaaatgagtggtgatgatttaatatgtaca

SEQ ID NO: 8280 - DNA, 204 bp, Zea mays
gctcaaaggggtacgatgctcatgtgcacattttaaatctggtgcatccattttacatctaacagcygcaccaattttgtgaagcaccccttccaccttcctcccctggtgggagggttcttcgtaaaattagctggtgccgttgaatacaagatggatgcaccagatttaaaatgtgcacatgagcaccgtacccctttaagc

SEQ ID NO: 8281 - DNA, 250 bp, Zea mays
cctcggtctggagggcgccgccgtcgtcatctcctcccgcaagcaggtccagctgagctggaaaaccttatcgcttattttacccttcttgcttgctgtcctcgctttgggatttccattactgctctctctgattgggggtttctgtggatcgattggggttgcggggcgttgcagaagaacgtgaacgaggcggtggaggggctcagggccaagggtatcaccgcggttggtgccgtctgccacgtct

SEQ ID NO: 8282 - DNA, 102 bp, Zea mays
aatttttagtctcaccattttattgtattttactctttaaattgtcaaatataccgtataatttagagattaaaatggaataaaatgaagggacaaaaaatt

SEQ ID NO: 8283 - DNA, 119 bp, Zea mays
tagtccctctaatttattccactttagtcactaaattgtcaaatatggaaactaaaataaagttatagtttccatattttgcaatttatagactaaagtggaataaaatggagggacta

SEQ ID NO: 8284 - DNA, 103 bp, Zea mays
ggtccccgctaagccgtcggacataaggctctattatgtccgacgaccctcgctgggtcgtcggacataatagagtcttatgtccaacagcttagcgggggtt

SEQ ID NO: 8285 - DNA, 184 bp, Zea mays
ccttgcagtcttaataagtagtagagatatatgagagagaaggatatgcacggaagtcgaacaaatcaatgagataattctgcatcagttgatacagatttatctatcctatggtaacaatcagattataataatcgtaaaacattgtattctatgtcactgcacgccattgtagacatgcatc

SEQ ID NO: 8286 - DNA, 181 bp, Zea mays
cttgcagtcttaataagtagtagagatatatgagagagaaggatatgcacggaagtcgaacaaatcaatgagataattctgcatcagttgatacagatttatctatcctatggtaacaatcagattataataatcgtaaaacattgtattctatgtcactgcacgccattgtagacatgca

SEQ ID NO: 8287 - DNA, 149 bp, Zea mays
  unsure (78): n = A, C, G or T
ctatatactaatttttagtccatctattttattctattttagtctctaaattgtcaaatacgaaaagtaaaatagagntttagtttctgtatttagtaatttatggactaaaatagaataaaatagatgaactaaaaatcagttcataa

SEQ ID NO: 8288 - DNA, 170 bp, Zea mays
tgttacttagtattttgatttatttatatatttgtagaatttatttacattttagattcaatggaactagaaggataaccttcatgcgtggtcgcaacatctttagagggtgtcgggactgtccatgaactgcatatgaaaaaaaaaagactgagtaatcttcaaaattg

SEQ ID NO: 8289 - DNA, 90 bp, Zea mays
ttctttccacgactttctcgcgtgtacattagggtcattcagctcgacacggtccaccgagggacacgctcgaaggctcaccttgtaatc

SEQ ID NO: 8290 - DNA, 73 bp, Zea mays
taaattgacgagcctctaatggttcggcggatcacgtggttcagcggatcagacagagtgctacaccaataac

SEQ ID NO: 8291 - DNA, 89 bp, Zea mays
gagtccaaataacggaggggattggagaatctaaaattcttgaataaggaggggattttagcccctctaatccccttcggttttgtggc

SEQ ID NO: 8292 - DNA, 88 bp, Zea mays
ctgaagcgccacaacatgtctaacttttctgcctaagcttagttattcaatttgagcgcctaaggttaggcagattgtagcgccttag

SEQ ID NO: 8293 - DNA, 191 bp, Zea mays
catcaagggggtgtttggtttctagtgactaatatttagtccctacattttattctatttaagtcacaaaattgtcaaatatagaaactaaaactttattttagtttctatatttgacaatttatacactaaaatagaataaaatgatgggactaaacattagtccctagaaaccaaacacccaccaaatc

SEQ ID NO: 8294 - DNA, 171 bp, Zea mays
ttcctcctatattatataagttggattatgttgggagggtagaagagtaaaatatcactttggaattacaaataagctaaaataagtcatttgagcttatttgtggtcataatgtgatattttactctcctactcttccactataattcaatttatataatttagcaggaa

SEQ ID NO: 8295 - DNA, 171 bp, Zea mays
cgtgcaagcaaggtttttggttcgtttgattatgatccaatcatgtatctcatttaacatttaaactcttccaccaccggctcgagtagatttatagaaaaccccctaacataccacgttcatgtctacagttagatcatgatctaacggaccaagaggctcgtttgcacg

SEQ ID NO: 8296 - DNA, 189 bp, Zea mays
ctaaagtttagttcgtgacacatcaaatatttgaatatcaattataagtattaaatacatgcttgattaggtttaataaatttatcttatcttttagtcttcatctatgcaattagtcttataattaaactatatttaatatccataattatcattcaaacattcgatgtgataaggactaaactttag

SEQ ID NO: 8297 - DNA, 88 bp, Zea mays
acaacaatagcgcaggtgcggagcctggtcagcgggggtaggggacaggcgatgggaggaaggcaccgcactgcgagaggaacagatc

SEQ ID NO: 8298 - DNA, 175 bp, Zea mays
agattgagatgagagaattgtggagagttagttggcagcagataagtccaagaaagtaggagttagttgagagtttataggagaagttggttagccatagggctatttataagccacatggcatcagggaataaagcaagcaagattattatttcctaatctctctctctctcta

SEQ ID NO: 8299 - DNA, 200 bp, Zea mays
cttaattcgtatggattggatgagattgagtcaagatcttgttgttcattttaatctcaattcaggtaaattggatatgattgagtgaagatcttgttgttcattttaatctcaattcaagtggattgaacgggattaagtgagtttaaatcataattctttgtaatttcttcaaatctcatcagtccatatagaatgga

SEQ ID NO: 8300 - DNA, 151 bp, Zea mays
catcactatctattttagatttaacgtttctggttgatcattgcaatttataaataacaccttccaccactacaccccactacgtcggaggctatccttagcaaaatataccaaacaattagagacgttagatctaagatgagtgataatg

SEQ ID NO: 8301 - DNA, 125 bp, Zea mays
atttagtcccttcattttattctattttagtctataaattgctaaatatagaaactaaaataaagttttattttctatatttagtaattttggaactaaaatggaataaaatgtagggactaaaa

SEQ ID NO: 8302 - DNA, 150 bp, Zea mays
aaccagccctaagggctgatttggtggtaagggatcccaagaggatctatgtggagaaattcacttgcaattcaattttgaataaaaggggattcctccccatggatcaccttaggatctcttaccaccaaatcagccctgaatgagttg

SEQ ID NO: 8303 - DNA, 250 bp, Zea mays
gaagctgatcacgccggagggggaggtggagctgcaggtgcccgacgacgtctacatcctggacttcgccgaggaggaaggcatcgacctgcccttctcctgccgtgcggggtcctgctcctcctgcgccggcaaggtcgtctctggctccgtcgaccagtccgaccagagcttcctcaacgacaaccaggtcgccgacggttgggtgctcacctgcgctgcgtaccccacctccgacgtcgtcatcgag

SEQ ID NO: 8304 - DNA, 126 bp, Zea mays
taacttatgtccgacggctgtcagataagccatcgaacatagttttatgtccgacggctatcagtccggccgtcggacgtaagcttctgtccgacgtcttatctgacagccgtcagatataagtta

SEQ ID NO: 8305 - DNA, 134 bp, Zea mays
aaaataacttatgtccgacggctgtcagataagccatcgaacatagttttatgtccgacggctatcagtccggccgtcggacgtaagcttctgtccgacgtcttatctgacagccgtcagatataagttattat

SEQ ID NO: 8306 - DNA, 89 bp, Zea mays
gaccacagaattgaactaagaaatagcagaacaccagaaacagtagagccaatggctgttctccatttatttaatccaatttcacagac

SEQ ID NO: 8307 - DNA, 154 bp, Zea mays
ttatataagttggattatggtggaagggtaggagggtaaaatatcactttgagatcacaaataagctgaaataagctatccaatgctagcttatttatggtcccaaaatgatattttaccctcttacccttccaccataattcaacttatataa

SEQ ID NO: 8308 - DNA, 148 bp, Zea mays
tataagttgaattatggtggaagggtaagagggtaaaatatcattttgggaccataaataagctagcattggatagcttatttcagcttatttgtgatctcaaagtgatattttaccctcctacccttccaccataatccaacttata

SEQ ID NO: 8309 - DNA, 168 bp, Zea mays
ctgcatttagggagttcctaccgagttgctaaatgtggagagtaaatagagttgaatagcaactaagtaaatttagcaagtttatttagagaatcattggagaagcatttttctgttcacttcttaaatttaagatttagagacttgtttagagaactattggagttg

SEQ ID NO: 8310 - DNA, 93 bp, Zea mays; identical to SEQ ID NO: 5349

SEQ ID NO: 8311 - DNA, 190 bp, Zea mays; identical to SEQ ID NO: 5707

SEQ ID NO: 8312 - DNA, 164 bp, Zea mays; identical to SEQ ID NO: 5551

SEQ ID NO: 8313 - DNA, 201 bp, Zea mays
agttaggagtatttaagggaactgttgaatgcatgtttttatgtttttttcttaaaaaaacttgatttagagaagactttcaggaagctcttggagatgctctaccaccaacgaagagaatacctctttcaaatacattgataaatactcactgtcatgtcatcatcaaatatttctatagttcaattaaaaaacatttct

SEQ ID NO: 8314 - DNA, 76 bp, Zea mays
gctcacgggggattggaggggattgagtgaaaaataaactaattttcctcttaatatccttcaatcgccccgtgat

SEQ ID NO: 8315 - DNA, 74 bp, Zea mays
ctcacgggggattggaggggattgagtgaaaaataaactaattttcctcttaatatccttcaatcgccccgtga

SEQ ID NO: 8316 - DNA, 115 bp, Zea mays
aaagttgatctgagcagtgcaatatataattctggcatactattctcgcaatcgttttggggttcagaatgggactgacatcagagtaatatgtggcataccttctgatcctctg

SEQ ID NO: 8317 - DNA, 156 bp, Zea mays
gcagtcctcttggttcgttagatttagatccaaccgtatgtataatcgtggcttgttagaaactttttataaagctacacgaggtggtggtgtgatgatttaaatgttaagtatagcatacagttagatctagatctaacggatcaagagagctgc

SEQ ID NO: 8318 - DNA, 124 bp, Zea mays
ttatagtccctccattttatttcattgtagtcactaaatcattaaatacggaaactaaaactctattttagtttctgtatttagcaatttaggactaaaatggaataaaatggatggactaaaa

SEQ ID NO: 8319 - DNA, 185 bp, Zea mays
tcctttctaaattatataagttggattatggtagaaaggtagaaggataaaatatcactttagaaccataaataagctaaaataaactagcaatgagtagcttatttcagcttatttgtgatctaaagaggtattttactctcctgctattccactataatctaatttttataatttaagaggga

SEQ ID NO: 8320 - DNA, 253 bp, Zea mays
ggtgtttttgtgttggaacctttggaatcagatagaaaatggggaaatcctccaccggtagaaaatgggtctgctagcaacttgtccgcaccgcctcctaatggagcttcaagttctgatcaacctgaaagatgattgagaagatggaactggtagatttttcgtggcatgagtctaaccaagatgggcttcaaaaggtggtgcaactaaccttggcagatcggttccaagggactcggacaatgggctcaat

SEQ ID NO: 8321 - DNA, 186 bp, Zea mays; identical to SEQ ID NO: 5425

SEQ ID NO: 8322 - DNA, 204 bp, Zea mays
ggcggcggcggcgcccggctctgctcggacggactccaccgaaggctcggctcccctcggactccacctgcgacggccggccctctgcctgcaccgacggtgcccggctccctcggcatccaccagcggtgcccgactccaagaaatgtacaagtcacggctgcaggagctgtgccagaagcggcgatgggcgccgccgttgta

SEQ ID NO: 8323 - DNA, 110 bp, Zea mays
cggggaggctagccgggcggccggagctccaaccgcaatcggtctcttgctctgctgctgcgatggaggcgtcgtcgttggcgctcgtggccgccgtgctcctcctgtcc

SEQ ID NO: 8324 - DNA, 260 bp, Zea mays
agtaatcgtcgtccttccagtggtgttgatgtggtgcgctcgatgaagtatagatagctaatgctagcatattgttgttacggtgtcttacaatttaatgtttagttcgctactgtgcctttgtatatcttgtgctacttttgtgatactttcattatattcatacatatgcatctgcatctcatttaggaccgagagatgctgattgtgcaagtgatgaggtgccaaccacaagatgcagttggtggacgacctgaaga

SEQ ID NO: 8325 - DNA, 208 bp, Zea mays
acaatgtttctgtgcaagcgtgcaagcaaatcatctgatccattagattacgatccaaccacagatataaccatgttttgttaggggatttttttataaagattattgagctggtagtggaagagtttaaatgttaaatgtgacttacggttggatcacgatctaatgaatcaaatgttttgcttgcacgtttgcatagaaggactgc

SEQ ID NO: 8326 - DNA, 78 bp, Zea mays
ggtaaaccattaagggcttgttcggtttgaggtggatccctcaatccactcctaaccaaacaagccctaaagtaaacc

SEQ ID NO: 8327 - DNA, 150 bp, Zea mays
catcatcactcattttagatctaacgtctctagttgtttggtatattttgctaaggacaccctccaacgtggtgttgtgtagtggtggaaggtgttatttgtaaattgaatgatcaattagagacgttagatctaaaatgggtggtgatg

SEQ ID NO: 8328 - DNA, 120 bp, Zea mays
gcgaaggagtagcagcagcaggcggcgccgagtagcggctccccatctcgagcttgccaccatggtgagcgcttacacctctccgttcctccccgctgccttgcgcgcgcacgctttcgt

SEQ ID NO: 8329 - DNA, 190 bp, Zea mays
gacgggcctaggacctctcccgcgacggtgcctcgatgtcgcgcctgctggcccgcggcgacagcttggtggtctgctccgatggcaccacccgatagagagccatacctgctccgcttgagcccgctgttcgtggatctcggcggcaccggtggcgtcgtgcccgtggcgctggaggccgaggccgccc

SEQ ID NO: 8330 - DNA, 234 bp, Zea mays
tctaatgaagtgtttggtttgaggaatgatatagtccatcatcttctcactcctcacttttttgtttggtttgtagaatgaagtgagttaattcatcaccacctcattcctcatagttagttgttcagtactaatatttggaatagagtcatctcaccgaatttgaggaatggacccatgatgcaccacttcattttggatagagtgattcatcaaaccaaacacctcataaaa

SEQ ID NO: 8331 - DNA, 111 bp, Zea mays
actctagtatttacctcaattcccatgtgttgatgttgattggggtgtaaattagtttaagttacactctaatccacctcaatacatgtggattgaggtcaatactagagt

SEQ ID NO: 8332 - DNA, 164 bp, Zea mays
aaacatatttccactggcggttggtgtaacagaaccgccagtgaaaatagaatatttccactggcggttggtgtaacagaaccgccagtgaaaattagatttccactgtcggttctgttacacctggcggttgtgttatgataaccgccagtagaaatatgttt

SEQ ID NO: 8333 - DNA, 111 bp, Zea mays
actctagtattgaccctaatccacgtgtgttgaggtggattggggtgtaaattagtttaagttccaccccaatccacctcaatacatgtggattgagctcaatactagggt

SEQ ID NO: 8334 - DNA, 209 bp, Zea mays
ccataataattcccgtcggtttttagggttgccgacgggagttaattaactaccgtcggccataacgaagccgacgggagataaaataactcccgtcggtttttagggctgtcgacgggagttattttactaccgtcggcttcgttatggccgacggtagttaattaactcccgtcggcaaccctaaaaaccgacgggaattattatgg

SEQ ID NO: 8335 - DNA, 76 bp, Zea mays
gtccaaaaaccggagaggattggaggggctaaaatcaactttattttagcccctttaatctcctctgtttttgtga

SEQ ID NO: 8336 - DNA, 184 bp, Zea mays
tgtgaagagagacctgaaggagtggaatattgacaaagagctcgccgcagataggaaggggtggaagtgtgcaattcacgtgccagaaccctgattgatagtttcgcttttcctccttaatagtttgaccttttcttgtgctcattttagatcttgctggttcttgtgggttttatctctttta

SEQ ID NO: 8337 - DNA, 162 bp, Zea mays
tagattttataagctggattatggtggaagtgtaggaggataaaatatcacttggtgattataaataagctaaaataaactatccaatgttaacttatttatggtctaaaagggatattttacctgcatactctttcaccataatttaacttatataaacta

SEQ ID NO: 8338 - DNA, 79 bp, Zea mays
tacacgatcacgccggccgccgacagcgccagcacggccctgccgctgccggggctggaggtggaggtgggttggggag

SEQ ID NO: 8339 - DNA, 110 bp, Zea mays
aaggcggtgctcggcgacgaggagcacctcaaggcctttgaggaaacgctcgcctcgccctcctctcctccatgtcaagcccaggtgggcctcgtcgtcggcaagctcag

SEQ ID NO: 8340 - DNA, 125 bp, Zea mays
tactagtccctccattttatttcactttagttcataaattgctaaatacggaaactataactctattttagtttccgtatttaacaatttaggaactaaagtggaataaaatggagggactaaaa

SEQ ID NO: 8341 - DNA, 82 bp, Zea mays
gtcgcctgcgccgcggcgttcgcgtgggcgtccagagcgcgcaacaggatcggccagatgttcacgctggggtgcaacgcct

SEQ ID NO: 8342 - DNA, 89 bp, Zea mays
ctcttgagaagattccgtcttctactttctcgagcgggcgtattctaaactgtctcgtaaatttagaggacgctgttaaattttttata

SEQ ID NO: 8343 - DNA, 83 bp, Zea mays
tgcaccactgcgtctcgtgcgcgatccacgctcacatcgtccgcgtccgatcccgtgagaagcgcagggaccgcaagccgccg

SEQ ID NO: 8344 - DNA, 125 bp, Zea mays
ttttagtctctccattttattctattttagtgtctaaattatcaaatacggaaactaaaactctattttagttttcatatctagcaatttagggactaaaatggaataaaatgaagggacaaaaa

SEQ ID NO: 8345 - DNA, 115 bp, Zea mays
cttgatttaaagagacgtccctgccagccattgggcgagatgggcggcattgttgtagagctctgcacatgacagtctgcttgcaggtgatggcaggacgactttggacgcccag

SEQ ID NO: 8346 - DNA, 161 bp, Zea mays
actccagcgtcttcctccggcagccctccaagcacaaggggagcgagtgcgcagaagagccgcagcaagattgggcaggaaccaacaagacgaccagcggccgcccttgttgccaggctcccaaatgcgccaaggaggcagcggggcgaagagcggagggg

SEQ ID NO: 8347 - DNA, 79 bp, Zea mays
gtcgtgctataggaccgaccaggcgcctaatcgtgattagggtaacgattaggacgcctattcggtcctggtaagtgtg

SEQ ID NO: 8348 - DNA, 131 bp, Zea mays
tatttgattgttgttttttttttggcccattagataaaagtttattggaaaggacaacctttcacagcaatatgcatcctctgctgtagtattatttctcaggggccaagataaaagacaatgtctggaac

SEQ ID NO: 8349 - DNA, 187 bp, Zea mays
ccgtgcacaaatgcacaaaacgaaatctggccgtctattttccatccaacgacatgacggcgcgggggtttttcacaaaacagactcggtaagctacggaggctgcgggagggttcatctgcaaatttacgacggccgttggatgggagacggacgaccaggtttcgttttgtgcatttgtgcacgg

SEQ ID NO: 8350 - DNA, 188 bp, Zea mays
cacttatggtgtgtttggttggatgtacaaggagggatgaaagggagcgaccagtttttatagtgtttggatgagagtcacgtggtggcgagataaacatatagtggtgccgtgattccaaaaaatcgagagaactgtgtcgtcccgtctcatcctactttaatatcaaaccaaacacattaatttgt

SEQ ID NO: 8351 - DNA, 125 bp, Zea mays
gtttagtcccttcattttgttctattttagtatataaattgataaatatagaaactaaaatagagttttagtttctatatttaataattttgtaactaaagtggaataaaatgcagggactaaaa

SEQ ID NO: 8352 - DNA, 183 bp, Zea mays
cctacaacatctgcacatgcagtgatgcctgagttataatttaaacataatataagaagctgattataattatactcctacacatgataacaaaggttgtgcaaggttaagcaaatagcaggcacacatccttgctcgctatcctcgctcgacaaggcatcagtgcatcacagtgtcgggcaa

SEQ ID NO: 8353 - DNA, 77 bp, Zea mays
tggccatgtgagggcatgttcgcttagaccaatccagatggggattggtctaaacgaacaagccctgagggtgccat

SEQ ID NO: 8354 - DNA, 162 bp, Zea mays
acaagaatgcccctatatttgtactaggtcgaaccagacaagggcacctggagcctggcggctagggttaggaggagtcgaggaggaattatgctggatttgctggtcgctggatgccggatagacgcaaaaacgattcggtggattataatggcattggtg

SEQ ID NO: 8355 - DNA, 109 bp, Zea mays
gggagccataaaatcggagaagattagagggattagattctccttcttattcagttttgaataagaagagaatttaaccacttcaatttcttccggttttctggctctc

SEQ ID NO: 8356 - DNA, 75 bp, Zea mays
tctttgtgtgccactgagtgacatatatgtatattttgtgtgtgtatgacatgtggggccagtggcacacaagga

SEQ ID NO: 8357 - DNA, 257 bp, Zea mays
cggctacggcatcgaccccgcctgcgtcctccgccgccggacctacgccgacacacgcggccgcgtcacgccctacctcctctacctcgatcacgcccacgccgacatcgtcctcgcgctccgcgggctcaacctcgtcaaggagtccgactacgcgctccttctcgacaaccgtctcggcaagcgccgcttcgacggcggctacgtccacaacggcctcctcagggccgccggctgggtgctcgatgctgagtgcg

SEQ ID NO: 8358 - DNA, 90 bp, Zea mays
caaagggattccgagaggattggaggggattgaggggaaaataaactaatttcttcatcaatctccttcaatcatcctgggatctcgggt

SEQ ID NO: 8359 - DNA, 80 bp, Zea mays
ggattccgagaggattggaggggattgaggggaaaataaactaatttcttcatcaatctccttcaatcatcctgggatct

SEQ ID NO: 8360 - DNA, 189 bp, Zea mays
ctaaaatttagttcatgacgtatcaaatgtttgaatatcaattataagtattaaatataggcttaattagttttaataaattcgtctcatcttttaatctttgtctatgtgattagctttataatcagactatatttaatgctcataattatcattcaaacattcgatgtgatagtgattaaactttag

SEQ ID NO: 8361 - DNA, 165 bp, Zea mays
tgtaaacttctaatctgaaccatatgatgttgatccaaggggacgtgcggaggagtaggaggggatttgaaaaagtgtgattagcagcgggcggttaagtataaaattatccacgctcttgcgtcctttggatcaacatcatgtggttcagattataagtttgca

SEQ ID NO: 8362 - DNA, 216 bp, Zea mays
gcaaaccaactcctccgtgcaatcgtgcaaacttctaatctgggccacatgatgttgatccaagggacacaggggcgtgaataattttacacttaaccacccgctgctaatcacattttttcagatccccttcgcactcccccacacgccaccttagatcaacatcatgtggttcagattaaaagtttgcacggttgcacggaggggttggtttgc

SEQ ID NO: 8363 - DNA, 163 bp, Zea mays
catgttgatccgtcataatttgatatcgtgtatatatatgtatagctgatagttaatatagttaagttatataagagatgtataaatctgtatgcgtatactataggtgtagcatatgcatgcatgatagaagcacgaaggttaaatgctgacgaatcacgtg

SEQ ID NO: 8364 - DNA, 162 bp, Zea mays
ctgcccaggaggcgtacgaggaggacgacgagatgccgggcggagcccagagagtgcagtgcgcgcaacagtaagcagactatcatcaaggcaattgggaggggtggtgcccttaaagcatgggagtgatctctggttttgctgtcgccgagctgggaaata

SEQ ID NO: 8365 - DNA, 144 bp, Zea mays
cccgcggcatgggcgcgcccgagccgccgcgcacctaccacatcaacctgtccgtgttcacctccctgccggacatgtgggccatcgggcagcagttccccatcatcccgatccagcggctgcaggagcggcccgccgtcgacg

SEQ ID NO: 8366 - DNA, 156 bp, Zea mays
cgtaagttagattatggtggaagggtaggatggtaaatatgactttgagattacaaataaggtgaaataagctacccaatgttagcttatttcagtttatctgtagtcccaaagtgatatttaccctactatccttccaacataatccaacttata

SEQ ID NO: 8367 - DNA, 179 bp, Zea mays
  unsure (132)..(133)..(134)..(135)..(136)..(137)..(138)..(139)..(140)..(141): n = A, C, G or T
cattacgatctgtgggcgaggagatatgcagccagtctacaaccatcttctggcctgagccctgtccctgcataataggtcgtcacgacaacgttgtacagcaggagttctaagatatgatgtgtttgggcnnnnnnnnnnaggtttgtggctcctgtttccatgttcaattttcaggc

SEQ ID NO: 8368 - DNA, 189 bp, Zea mays
ttatataagttggattatggtggaagggtgagaggggtaaaataccactttgggatcataaataagctaaaataagctacccaatgctagcttatttcagcttatttgtgtagcatatttcagcttatttgagatcccaatgtgatattttaccccacatatccttacatcataatccaacttatataa

SEQ ID NO: 8369 - DNA, 232 bp, Zea mays
gttttggatcttttgtgcgagtcttgtatctcgtgtacgttgcattgcattgttgtgttatgcttctgctggcttgtaccgccttgttatgtgacatctggtgtgtgtggattctgggaatccaaagaaagctcgggagctgcagcgggcgctgcgcggcatggaatgatttgccaaattgaaatcacgacaacatgcctacgatgcaaactgggcataagagacagacgag

SEQ ID NO: 8370 - DNA, 97 bp, Zea mays
taaaacatatttcctccgtttcgttttagtagtcgttggatagtataaaattaattatccagcgataactaaaaagaaacggagagagtaataaata

SEQ ID NO: 8371 - DNA, 77 bp, Zea mays
atcctcttcggattggaggggattgaggtggaaataaactaatttcctcttcaatccccttcaatcccgaaggagat

SEQ ID NO: 8372 - DNA, 74 bp, Zea mays
tcctcttcggattggaggggattgaggtggaaataaactaatttcctcttcaatccccttcaatcccgaaggag

SEQ ID NO: 8373 - DNA, 91 bp, Zea mays
  unsure (41)..(42): n = A, C, G or T
tcagaatagcacggctcgacacggcttggatcggtccgatnncgaaaatttagatctgacctaactctgtatttagaccatgctattttga

SEQ ID NO: 8374 - DNA, 84 bp, Zea mays
gtcaatttatatactaaaatggaacaaaatgaagggactaaatattagtcccttcattttgttcaattttagtacttaaattgt

SEQ ID NO: 8375 - DNA, 180 bp, Zea mays
ggtgcaagcatgcaatcaatcaatccggtgtatccaatctagatccaatgatgaatgttactttacaggtaaccccttccacttgaaacctagtacctattttacttttaaccccttccatatgaaaccattgaatctagattagatgttctggatagtttgattgcacacttgcaccaa

SEQ ID NO: 8376 - DNA, 200 bp, Zea mays
tcatttatattggtgcaagcatgcaatcaatcaatccggtgtatccaatctagatccaatgatgaatgttactttacaggtaaccccttccacttgaaacctagtacctattttacttttaaccccttccatatgaaaccattgaatctagattagatgttctggatagtttgattgcacacttgcaccaaatgagtgat

SEQ ID NO: 8377 - DNA, 163 bp, Zea mays
taggcaccaacttcgttcgtgtacagttaacaacgttaagagccaagggtataattgtcagttaaagtgtaagagttaacgtccaggtcagtgaagaagtacaaatggcattatatctgtgaaccgttgtttgaaactggcagagtagcgaagcacattgccc

SEQ ID NO: 8378 - DNA, 138 bp, Zea mays
ttccctgtatgccatcggaaaatatactagttacttgtgtgccactggtcccatatgtcatacacacaaaaaaatatatctatatgccactcagtggcacacaaggaatgagtataaaatctgatggcataccagaaa

SEQ ID NO: 8379 - DNA, 128 bp, Zea mays
  unsure (7): n = A, C, G or T
aatttangtgctgtttggttcaataaatgtaacgcaaagggtaatggtaagggactaaaacaaacatgatttaatattatcgtttacccattacgttacaaatatctgaaccaaacggtaccttagtt

SEQ ID NO: 8380 - DNA, 88 bp, Zea mays
ttacgtggcaggttaggctttaggtcgacggtgagctggacagccgcaatggcgccatcgtcggacgtggtgcccaacacggcccggg

SEQ ID NO: 8381 - DNA, 89 bp, Zea mays
acactcgacggacggcgatgctcggcaaaggatcgtgtatagcttacgaccattatctttgccgagcgtcagacgttgaatcgaattgc

SEQ ID NO: 8382 - DNA, 206 bp, Zea mays
ctcttcgtctcagtaatagtgacagcattcaccctccaggtacacacacacactacatactctccattctcatcactgatgaacattcaagctaataatcacttcgcggcctttgcaggatggttcgtcacactacctcaaggggatccttctgctgctgtgctacattgtgatcggtgcatgcttctttgttacgaggcaacctg

SEQ ID NO: 8383 - DNA, 249 bp, Zea mays
gtgtgtgtgtgtgacatgctcatatatcttccatgatcaaggtaatgatcggcgttgagtgtgttgctcaaccgccattatacaatatgcaattattattagataattatcaacgagattcctgaattatatttttggatggagggagtagtatttaaagaagagccttgcatgcaatttctttttgtttgaataatgttttcaacttaaattcgatcagacttgtgagtcattttcataaaccaacac

SEQ ID NO: 8384 - DNA, 73 bp, Zea mays; identical to SEQ ID NO: 5757

SEQ ID NO: 8385 - DNA, 105 bp, Zea mays
tctactttattctattttaattcataaattgttaaataagaaaattaaaatggagttttagtttctatatttagtaatttagggactaaaatggaataaaattga

SEQ ID NO: 8386 - DNA, 73 bp, Zea mays
  unsure (1): n = A, C, G or T
ngggaggctgcgctgctgctgctgctcctgtgcgcggcggcgttcgtggagcgcggcgcggcgctgcacctct

SEQ ID NO: 8387 - DNA, 140 bp, Zea mays
taaagtcgttcgactaatcgtgattagtcggccttatcgctggagcaagctcgaccagggtcttcgactcgactagggtgactaggaagcgattagtctcctagtcgccgactaatcgcgattagtcgtccgactagtgt

SEQ ID NO: 8388 - DNA, 119 bp, Zea mays
ggcggagaaggccagcagcaccacggggccgatcacccaccccagctgcgcgatcgcccacgccagcgacagcacgcccgacccgatcaccgccgtgatgatgtgcgcgctcgccgtca

SEQ ID NO: 8389 - DNA, 141 bp, Zea mays
aatatacattagggctagtttggaaactcaaatccccttcggtattgaagggaattggagaacaaattagtttatttctacctcaatccccaccaatctcgaagagaatttgaggttcccaaagtagcccttatggacgag

SEQ ID NO: 8390 - DNA, 125 bp, Zea mays
ttttagtccctatattttattccactttagtctataaattgccaaatacggaaactataactacattttagtttccatatttagcaatttatgaactaaagtggaataaaataaagggactaaaa

SEQ ID NO: 8391 - DNA, 80 bp, Zea mays
tccatcttatttgattttagtctataaattattaaatacgagaattttgtaatttagggactaaaatagaataaaatgga

SEQ ID NO: 8392 - DNA, 143 bp, Zea mays
agcattcatcttatatctaacgtatgtagttgtttggtatattttactaatcacaccctccaacgtggtggagtgtagtggtggaatgtgttatttataaattgcaataatcaactagagacgttagatataagatgagtggt

SEQ ID NO: 8393 - DNA, 234 bp, Zea mays
tatcacaacaacagctacaggcactttcggcggccattgttattttcggcggcctatacccggccgccgaaaataacctggtatttccggcggcttctcgaagccgccgaaaataaggttattttcggcggcttcgagaagccgccggaaataccaggttattttcggcggccgggtataggccgccgaaaataacaatggccgccgaaagtgcctgtagctgttgttgtgata

SEQ ID NO: 8394 - DNA, 159 bp, Zea mays
acccctctagattatataagttggattataatagaagagtaatatgttaaaatatcattttggtatcacaaataagctgctagcttatttgttgtaccaaagtgatattttatcttcctactcttctactataatctaacttatataatttagaagtaa

SEQ ID NO: 8395 - DNA, 239 bp, Zea mays
ccggtgaggtgaacgtccgtgttccccacgtgagtggccaggtcctcgtgccacgtcatcgtcgccgccgccgtcgtcttgccgccgcggcgccgatcgcttttgctccgcgtgtacgtgctcccagtcccaagagagaggtttggaaattgggaggcgaagaagggaggagtggaagaccggcactgggagttggaaacggaggcgaaatggcgagcttgagacgtttggctgacttg

SEQ ID NO: 8396 - DNA, 141 bp, Zea mays
gaaacaaatttgttgcagctcctcacaaaaaaggaggataaactttacctgcatgtctactagataacgttttagttgtattattggtctacagatgaagcatatcctcttttttgtgaggggctgcagcaaatttttttc

SEQ ID NO: 8397 - DNA, 159 bp, Zea mays
aacgaaaatgtggcgaccgcccgctcggcgggcgcgcggcgagagagctcaccggagtcgggcggatctcttgggcaggaagcccaggacagcggtgcagcgtggggaaggggcgctcgccgacgagcggggccgggcggtgggggccaccgtcagtgg

SEQ ID NO: 8398 - DNA, 177 bp, Zea mays
gcgccttcgccggccacggccacggcgtcggcatggtcccggccggcccgatgggcatgcagcacaacgcggctcctcccatgatgtacccggcgccgccgcccggcgctgtatacccggtgatgggcgacggcatggggtaccacggcggcgccgggggcgtggcggtggtgccgc

SEQ ID NO: 8399 - DNA, 114 bp, Zea mays
aagtgatgtggtgcatctaatcaaaattcaacggtggcacatattttaggtagaaggggttaaatataaaatagcagttaccattggattttgattggatgcaccagattcatt

SEQ ID NO: 8400 - DNA, 79 bp, Zea mays
actctagtattcattccaatccacatgtaatgatgtggattgagacgtaatacatgtggattgaggtgaatactatatt

SEQ ID NO: 8401 - DNA, 93 bp, Zea mays
tttgacccgatgggtgacccatacccacatgagtatgggtatgggggtaaattcatacccaccagtgtatatgggtgactcggtggggttatt

SEQ ID NO: 8402 - DNA, 146 bp, Zea mays
tcaaaccagactgtttacagcccctcacaaaaagaaatatagaccccacctgcaggtccatcggataacgttttagttgagttattgctgctgcgggtggggtctatcttccttttttgtgaggggctgcaaagagtctggtttac

SEQ ID NO: 8403 - DNA, 148 bp, Zea mays
gttgcgccctgcacgttcttcgggacgccgtttccacaggagggccagaagaaggcgcctcgggtcatgctggtgttcttctgcatcccggtcggtcctggcaggagcagggtgatctgggcgttcccgaggaacgtcggggtctggc

SEQ ID NO: 8404 - DNA, 89 bp, Zea mays
tggtggcggcgacgctccggtgggtgctgcagctgcaccgggacgtaccgcgggcagcacggttctactcggagggtctcgacttcagt

SEQ ID NO: 8405 - DNA, 201 bp, Zea mays
taacctttttggagagcctaagcatctcaagtttgaccaaaattatagagagagttaacaaccttatgaaataaagctggtattactatgataatacaattaataaagaatctaacaatacttaattggtaccatgaatattataattttattatataactttggttaaacttgagatgctctggctctttaaaaagttga

SEQ ID NO: 8406 - DNA, 144 bp, Zea mays
caccattcattttagatttaacgtctctagttgtttggtacattttactaaagacacccttcaacgtggtggtgtgtagtggtggaaggtgttatttgtaaattgaataatcaactagagacgttagatctaaaatgagtgatg

SEQ ID NO: 8407 - DNA, 259 bp, Zea mays
ttttttgtttggttgaagagtagaatagagtggagtcactctgttttttgtttggttggagagtcatatgagtatagaggagaggagagcgctcgcatctggtcgtttttgtggagcggaagcattctaattatttatagtaaatttctatatagagactccagtaaccgtttcgctcttattttttttgaaaaccaaacatccaaataataagaacggagccacttcattctcattcactcctcaaccaaacacatcc

SEQ ID NO: 8408 - DNA, 74 bp, Zea mays
tcacaggaggattggaggggattgagggggaaattagtttatttccctctcgaccccttccaatcctcccgtga

SEQ ID NO: 8409 - DNA, 120 bp, Zea mays
gggatttacaccctctccaatccctccaaaacactctaatatcaaagtattcaaactaggccttaaggggttgtttggaaacaagagtaatggagtggattgagggggccaaaattcctt

SEQ ID NO: 8410 - DNA, 136 bp, Zea mays; identical to SEQ ID NO: 5720

SEQ ID NO: 8411 - DNA, 150 bp, Zea mays
atcaatatccattttagatctaacgtttctagttaatcatggcaatttacaaatacccccttccaccactacacaccaccacgtcggatgatgttcttagcaaaatatatcaaataattagagacgttagatctaaaataagtgatgatg

SEQ ID NO: 8412 - DNA, 174 bp, Zea mays
ggggaatgttactacaccaccatctactgatctataaccaggggaaacattgaagtcaggcgtggtggagaagcgggttggtcgcaagcgccaagctaatgttcgtatctctagacctgagtgggtgtaatgtctctgtgtggcggtccctggtgtgtgtggctgacaggcagg

SEQ ID NO: 8413 - DNA, 163 bp, Zea mays
ttatatatgttggattatggtggaagggtaatagggtaaaaatcactttaggactgcaaataagctaaaataatctaacattgggtagtttatttcagcttatttgtgatcttaaagttgtattttaccctattactctttcaccataatccaacttatataa

SEQ ID NO: 8414 - DNA, 71 bp, Zea mays
gaaattagtcgtaggaagttagtcagctgatggcgctgatgacgtgaagctactaacttctgagaacctac

SEQ ID NO: 8415 - DNA, 147 bp, Zea mays
ctcggcgatcttcggcgcgagagaggagaatccctgctggaacccttccgccgacagaacctcgcagcttatggaagggcgcagggcagcgattagcgtcgagcaggtctcctcctgcctctccttcttgtgcagcagctccatgcc

SEQ ID NO: 8416 - DNA, 221 bp, Zea mays
tttatatagattatataatgtagtttatataatcttatttggtgggtaaatattcaccaagttttaaggtcacagggtaaaaaataatctaaataaacacataatgtcatacttatatattattatattctgggtacctagattatataattcatcccaataatttgtgtcgtttgtttgtctcttaacttatataagttggattatataatctatatggt

SEQ ID NO: 8417 - DNA, 155 bp, Zea mays
ggcagagatccaagtaggctgatggggattgtggatggtggtgtcggcatagttgtgttacgtttcttcgatgcgtgagttcatggagagatgtcacatcctagttcgtcgtcaccgtttgccatgggtccaatggctcgtcttggaaacctgca

SEQ ID NO: 8418 - DNA, 96 bp, Zea mays
aaagcaaagagagccgaaagcggctgctagctagtggcagcaaccagcaggcagacaggtcatagctagcagactgcttgcggcttggcttaccgc

SEQ ID NO: 8419 - DNA, 150 bp, Zea mays
ccttggcgtcagagtccggggtgtactgtcgcagcgtgaggacgccctgtatgttgctggagttggaggcggcgccagcagcatcgatggcggcggtggcgagccagtcggtcgcgatccaggtgtaccccgagaccatcatgccgagcc

SEQ ID NO: 8420 - DNA, 244 bp, Zea mays
gcgtgtacttggaccccatctccgccggcgccgcgcctcctcctagagcattcgccgggaagccgcctcctraggtgttccgctgcgtttcggaggcctcccggtggccgctgcctgcgttccggcagctcggctcggctctgcgctcgccgcgcgggcggatggcgggatggggctcgtgggctggctggccggccggggttggttggtgcggtgtgggtgtgggtgtggcgcagtcggggtg

SEQ ID NO: 8421 - DNA, 231 bp, Zea mays
taggatgatgcatcatcacctcattcctcataagtcaatgattagtactaatatgaggaatgaagtcaatttactaaggtggtgtttggtttgaggaatcacttcatccaaaatgaggtagacaggtggtgcatcataagtctattcctcagatttggtagaatgaccccattcctcatgttagtactaactaacaaactataaggaatgaggtggtgatggatcaactca

SEQ ID NO: 8422 - DNA, 235 bp, Zea mays
aataggatgatgcatcatcacctcattcctcataagtcaatgattagtactaatatgaggaatgaagtcaatttactaaggtggtgtttggtttgaggaatcacttcatccaaaatgaggtagacaggtggtgcatcataagtctattcctcagatttggtagaatgaccccattcctcatgttagtactaactaacaaactataaggaatgaggtggtgatggatcaactcatt

SEQ ID NO: 8423 - DNA, 172 bp, Zea mays
cgtacaagtaggtcttttggtccgctagatttagatctaaccgtagatgcgatcatggtttgttaggagctttttttataaagctccacgaggtggtggtggaagggtttaaatgctaaatatgacatacggttggatctagatctaacggaccaagaggcctgcttgcacg

SEQ ID NO: 8424 - DNA, 111 bp, Zea mays
tgatttagtgacccgggatcccgggaggatcggaggggattgagggggaaattagttcatttccctcttaatcccatccaatcctcctgggatccccttgtcaccaaatca

SEQ ID NO: 8425 - DNA, 137 bp, Zea mays
catatttagagttgatttagtgacccgggatcccgggaggatcggaggggattgagggggaaattagttcatttccctcttaatcccatccaatcctcctgggatccccttgtcaccaaatcaaccttagtctctta

SEQ ID NO: 8426 - DNA, 102 bp, Zea mays
  unsure (90)..(90): n = A, C, G or T
tggcggcgagggttggccgccgaaaataatgttatttccggcagcttctgacacagccgccaaatttaacagcttattttcggcggctanccctggccaccg

SEQ ID NO: 8427 - DNA, 3276 bp, Zea mays
  unsure (3274)..(3274): n = A, C, G or T
agggatggcaacgggtcggatcaaccgaacggggccttaggggtaggaagttagtcagctgaccggagtgtggcgcggtgtggcactaaagtggaataaaatgtacccccatcactagcgggccgttaatttagggactaaaatgaaattatataagttggattatgataaaatgagtggtgatgatttatgtgcacatgagcaccgtacgagggcgccgccgtcgtcatcaaaatggaataaaatgaagggatagactaaagtggaataaaaaagccgtcggacataaggctcttaataagtagtagagatatataataagtagtagagatatatatttttagtccatctattttaaaaaaaaaagactgagtaatcagggacacgctcgaaggctcaagcggatcagacagagtgctaaacggaggggattggagaatcgcctaaggttaggcagattgttagtccctagaaaccaaacacattatataagttggattatgtgatctaacggaccaagaggctaacattcgatgtgataaggacggaaggcaccgcactgcgagagagagaattgtggagagttagatggattggatgagattgagtagagacgttagatctaagatgactaaaatggaataaaatgtaaagggctgatttggtggtaagacgccggagggggaggtggagccgacggctgtcagataagccatgtccgacggctgtcagatattgaactaagaaatagcagaatggattatggtggaagggtagattatggtggaagggtaagagggagttcctaccgagttgctagggcttcttcttgcgcaggcctagtccctagaaaccaaacagtcgtctaacctcaatctcattatttaagggaactgttgaatggattggaggggattgagtgaaattggaggggattgagtgaaatgagcagtgcaatatataattagatctagatctaacggatcaactaaaatggaataaaatggaattatataagttggattatggggttccaagggactcggacaaggttcacaaaatgtaacgtaatgtgccagaagcggcgatgggggcgctcgtggccgccgtgctaaccacaagatgcagttggtgtgtgcaagcgtgcaagcaaattaagggcttgttcggtttgagagagacgttagatctaaaatgagcagcagcaggcggcgccgagtgcccgtggcgctggaggccagtgattcatcaaaccaaacaaatacatgtggattgaggtcaccactggcggttggtgtaacaaatacatgtggattgagctcacaaccctaaaaaccgacgggacggagaggattggaggggctattgctggttcttgtgggttttaagctggattatggtggaagtccggggctggaggtggaggtgtcggcgacgaggagcacctcaactaaagtggaataaaatggaggccagatgttcacgctggggaaatttagaggacgctgttaaccgtgagaagcgcagggaccgactaaaatggaataaaatgaaaggtgatggcaggacgactttcaaggaggcagcggggcgaagaggaccgaccaggcgcctaatttgttttttttttggcccattatgcacaaaacgaaatctggcgtgtttggttggatgtacaagactaaagtggaataaaatgcactgcacatgcagtgatgcctgggtctaaacgaacaagccctgaacgattcggtggattataataaatcggagaagattagagggtatgacatgtggggccagtgggccgccggctgggtgctcgatccgagaggattggaggggattaggattggaggggattgagggaacattcgatgtgatagtgataacatcatgtggttcagattatttgcacggttgcacggagggcgtcataatttgatatcgtgttctggttttgctgtcgccgagcagcggctgcaggagcggcccattatggtggaagggtaggattgtgggcgaggagatatgcagtggattatggtggaagggtgattttgtgcgagtcttgtatctaactaaaaagaaacggagagagattggaggggattgaggtggattggaggggattgaggtggaacggctcgacacggcttggatatactaaaatggaacaaaatgtctggatagtttgattgcacatggtgcaagcatgcaatcaatgaaactggcagagtagcgaagatgagtataaaatctgatggcacaaatatctgaaccaaacggggttaggctttaggtcgacggttgccgagcgtcagacgttgaggtgcatgcttctttgttacgagacttgtgagtcattttcatatgtgttaaggtggattaggataatttagggactaaaatggacgctgctgctgctgctcctgtgactaatcgcgattagtcgtcaccgccgtgatgatgtgcgcgagggctagtttggaaactcaaactaaagtggaataaaataaataatttagggactaaaatagaaactagagacgttagatataaacagctacaggcactttcggcattatataagttggattataaaatggcgagcttgagacgttttttttgtgaggggctgcagcaggggccgggcggtgggggccacggccacggccacggcgtcggttggattttgattggatgcacaatacatgtggattgaggtgacagtgtatatgggtgactcggtttgtgaggggctgcaaagagtgggcgttcccgaggaacgtcacggttctactcggagggtctggagagcctaagcatctcaagaactagagacgttagatctaaggttgaagagtagaatagagtattggaggggattgagggggaatggagtggattgagggggccgtggcaagagaattgaagaaaagagacgttagatctaaaatacggtccctggtgtgtgtggcttggattatggtggaagggtaagtaggaagttagtcagctgatttcggcgcgagagaggagaattatataagttggattatataacaagtaggctgatggggattgctagcagactgcttgcggcttcaggtgtaccccgagaccatcgtgtgggtgtgggtgtggcgccatcatcacctcattcctcataaggaatgaggtggtgatggagatctaacggaccaagaggccacccgggatcccgggaggatccccttgtcaccaaatcaacctgcttattttcggcggctancc

SEQ ID NO: 8428 - RNA, 28 nt, Artificial Sequence
  synthetic oligonucleotide
ggucuuagucgcauccuguagauggauc

SEQ ID NO: 8429 - RNA, 25 nt, Artificial Sequence
  synthetic oligonucleotide
  unsure (25)..(25): n = inverted deoxythymidine
augcacacugaugcugacaccugcn

What is claimed:

1. An isolated polynucleotide comprising: a microRNA selected from the group consisting of SEQ ID NOs:1-2652 and SEQ ID NOs:7959-8114.

2. The full-length complement of the microRNA of claim 1, or a nucleotide sequence capable of hybridizing to the microRNA of claim 1, wherein said nucleotide sequence comprises at least 21 nucleotides.

3. An isolated polynucleotide useful for altering plant gene expression comprising SEQ ID NO:7597 or SEQ ID NO:8427 wherein said isolated polynucleotide comprises at least one functional domain having at least 21(x) contiguous nucleotides and x is an integer from 1 to 2652, further wherein said nucleotides start at nucleotide 1 or any nucleotide 21(x)+1.

4. A functional subdomain of the isolated polynucleotide of claim 3, wherein said functional subdomain comprises at least one microRNA.

5. An isolated polynucleotide comprising a microRNA containing sequence selected from the group consisting of SEQ ID NOs:5305-7956 and SEQ ID NOs:8271-8426.

6. A recombinant DNA construct comprising the isolated polynucleotide of claim 1, 2, 3, 4, or 5 operably linked to at least one regulatory sequence.

7. A plant, plant tissue, or a plant cell comprising in its genome the recombinant DNA construct of claim 6.

8. Transgenic seeds, transgenic seed by-products, or transgenic progeny plants obtained from the plant of claim 7.

9. A method for altering expression of a stably introduced nucleotide sequence in a plant comprising:
a) making a DNA expression construct comprising a stably introduced nucleotide sequence and at least one sequence capable of hybridizing to the isolated polynucleotide of claim 1;
b) transforming a plant with the DNA expression construct of part (a); and
c) selecting a transformed plant which comprises the DNA expression construct of part (a) in its genome and which has altered expression of the stably introduced nucleotide sequence when compared to a plant transformed with a modified version of the DNA expression construct of part (a) wherein the modified construct lacks the sequence capable of hybridizing to the isolated polynucleotide of claim 1.
